(19) United States
(12) Patent Application Publication
(10) Pub. No.: US 2024/0335536 A1
(43) Pub. Date: Oct. 10, 2024

(54) METHODS OF ENGINEERING IMMUNE CELLS FOR ENHANCED POTENCY AND PERSISTENCE AND USES OF ENGINEERED CELLS IN IMMUNOTHERAPY

(71) Applicant: Nkarta, Inc., South San Francisco, CA (US)

(72) Inventors: James Barnaby Trager, Albany, CA (US); Ivan Chan, Millbrae, CA (US); Don-Hong Wang, Palo Alto, CA (US); Guangnan Li, Foster City, CA (US); Alexandra Leida Liana Lazetic, San Jose, CA (US); Chao Guo, San Francisco, CA (US)

(21) Appl. No.: 18/255,222

(22) PCT Filed: Dec. 2, 2021
(86) PCT No.: PCT/US2021/072715

§ 371 Date: May 31, 2023

Related U.S. Application Data
(60) Provisional application No. 63/264,234, filed on Nov. 17, 2021.
(60) Provisional application No. 63/264,223, filed on Nov. 17, 2021.
(60) Provisional application No. 63/236,167, filed on Aug. 23, 2021.
(60) Provisional application No. 63/201,159, filed on Apr. 15, 2021.
(60) Provisional application No. 63/121,206, filed on Dec. 3, 2020.

(51) Int. Cl. A61K 39/00; C07K 14/54; C07K 14/725; C07K 14/74; C07K 16/28; C12N 5/0783

(52) U.S. Cl. CPC A61K 39/4634; A61K 39/001112; A61K 39/4611; A61K 39/4613; A61K 39/4631; A61K 39/4635; C07K 14/5443; C07K 14/7051; C07K 14/70539; C07K 16/2803; C12N 5/0636; C12N 5/0646; A61K 2239/26; C12N 2510/00

(57) ABSTRACT

Several embodiments of the methods and compositions disclosed herein relate to immune cells that are engineered to Mexpress chimeric antigen receptors as well as genetically edited or otherwise engineered to alter the effectiveness with which another immune cell can target and induce cytotoxic effects on the engineered cells. In several embodiments, the methods and compositions disclosed herein reduce fratricide within a therapeutic cell population, which in some instances comprises mixture of immune cell types. Additionally, the methods and compositions disclosed herein enhance one or more aspects of the efficacy of the immune cells in cellular immunotherapy including cytotoxicity and/or persistence, as well as reduced graft versus host or host versus graft effects.

### RELATED APPLICATIONS

[0001] This application claims priority to U.S. Provisional Patent Application No. 63/121,206, filed Dec. 3, 2020, U.S. Provisional Patent Application No. 63/201,159, filed Apr. 15, 2021, U.S. Provisional Patent Application No. 63/236,167, filed Aug. 23, 2021, U.S. Provisional Patent Application No. 63/264,234, filed Nov. 17, 2021, and U.S. Provisional Patent Application No. 63/264,223, filed Nov. 17, 2021, the entire contents of each of which is incorporated by reference herein.

### FIELD

[0002] Several embodiments disclosed herein relate to methods and compositions comprising genetically engineered cells for cancer immunotherapy, in particular combinations of engineered immune cell types. In several embodiments, the present disclosure relates to cells engineered to express chimeric antigen receptors. In several embodiments, further engineering is performed to enhance the efficacy and/or reduce potential side effects when the cells are used in cancer immunotherapy.

### BACKGROUND

[0003] As further knowledge is gained about various cancers and what characteristics a cancerous cell has that can be used to specifically distinguish that cell from a healthy cell, therapeutics are under development that leverage the distinct features of a cancerous cell. Immunotherapies that employ engineered immune cells are one approach to treating cancers.

### INCORPORATION BY REFERENCE OF MATERIAL IN SEQUENCE LISTING FILE

[0004] This application incorporates by reference the Sequence Listing contained in the following ASCII text file being submitted concurrently herewith: File name: NKT068NP_ST25_update.txt; created Mar. 6, 2024, which is 2,468,748 bytes in size.

### SUMMARY

[0005] Immunotherapy presents a new technological advancement in the treatment of disease, wherein immune cells are engineered to express certain targeting and/or effector molecules that specifically identify and react to diseased or damaged cells. This represents a promising advance due, at least in part, to the potential for specifically targeting diseased or damaged cells, as opposed to more traditional approaches, such as chemotherapy, where all cells are impacted, and the desired outcome is that sufficient healthy cells survive to allow the patient to live. One immunotherapy approach is the recombinant expression of chimeric receptors in immune cells and further engineering or genetically editing the cells to avoid adverse immune responses against the therapeutic cells in order to achieve the efficient and persistent targeted recognition and destruction of aberrant cells of interest.

[0006] In several embodiments, there is provided a population of genetically engineered and gene edited immune cells, comprising genetically engineered immune cells that express a cytotoxic receptor comprising that targets a tumor marker expressed by a target tumor cell, wherein the immune cells are genetically edited at one or more target locations in a CISH gene that encodes a CIS protein, wherein the edits yield reduced expression and/or function of CIS as compared to an immune cell not edited at the location or locations in the CISH gene, wherein the immune cells are genetically edited at one or more target locations in an additional gene encoding an additional protein, wherein the edits to the additional gene yield reduced expression and/or function of the additional protein as compared to an immune cell not edited at the location or locations in the additional gene; and wherein the genetically engineered and edited immune cells exhibit one or more of enhanced expansion capability, enhanced cytotoxicity against target cells, enhanced persistence, or other beneficial characteristic, as compared to immune cells that do not comprise said genetic edits at the CISH and additional genes.

[0007] In several embodiments, the cells are edited at an additional target site in a Cbl proto-oncogene B protein (CBLB) gene. In several embodiments, the cells are edited at an additional target site in a transforming growth factor receptor beta 2 (TGFBR2) gene. In several embodiments, cells are edited at an additional target site in a TIGIT gene. Combinations of edits are provided for as well, such as cells edited at CISH/CBLB/TGFBR2, CISH/CBLB/TIGIT, CISH/TGFBR2/TIGIT, and the like. In several embodiments, a guide sequence of any of SEQ ID NO: 153-157 or 562-565 is used to target the CISH gene. In several embodiments, a guide sequence of any of SEQ ID NO: 164 to 166 or 552-555 is used to target the CBLB gene. In several embodiments, a guide sequence of any of SEQ ID NO: 147 to 152 or 544-547 is used to target the TGFBR2 gene. In several embodiments, a guide sequence of any of SEQ ID NO: 507-510 is used to target the TIGIT gene. In several embodiments, the cells are further edited at one or more additional target sites in a gene encoding ADARA2, SMAD3, MAPKAPK3, CEACAMI, DDIT4, NKG2A, SOCS2, B2M, PD-1, TIM-3, CD38, or TCR alpha.

[0008] For example, in several embodiments, the cells are further edited at one or more of: (i) a gene encoding NKG2A and wherein a guide sequence of any of SEQ ID NO: 548-551 is used to target the NKG2A gene, (ii) a gene encoding SOCS2 and wherein a guide sequence of any of SEQ ID NO: 556-561 is used to target the SOCS2 gene, (iii) a gene encoding B2M and wherein a guide sequence of any of SEQ ID NO: 199-208 is used to target the B2M gene, (iv) a gene encoding PD-1 and wherein a guide sequence of any of SEQ ID NO: 511-514 is used to target the PD-1 gene, (v) a gene encoding TIM-3 and wherein a guide sequence of any of SEQ ID NO: 515-518 is used to target the TIM-3 gene, and (vi) a gene encoding TCR alpha and wherein a guide sequence of any of SEQ ID NO: 566-568 is used to target the TCR alpha gene. In several embodiments, the cells are further edited at one or more of: (i) a gene encoding an adenosine A2 receptor and a guide sequence of any of SEQ ID NO: 503-506 is used to target the adenosine A2 receptor gene, (ii) a gene encoding SMAD3 and wherein a guide sequence of any of SEQ ID NO: 491-493 is used to target the SMAD3 gene, (iii) a gene encoding MAPKAPK3 and wherein a guide sequence of any of SEQ ID NO: 494-496 is used to target the MAPKAPK3 gene, (iv) a gene encoding CEACAMI and wherein a guide sequence of any of SEQ ID NO: 497-499 is used to target the CEACAMI gene, (v) a gene encoding DDIT4 and wherein a guide sequence of any of SEQ ID NO: 500-502 is used to target the DDIT4 gene, and (vi) a gene encoding CD38 and the wherein a guide sequence of any of SEQ ID NO: 519-522 is used to target the CD38 gene. Other guide sequences targeting those genes are also used, in several embodiments. In several embodiments, the cells are not edited at a CD70 gene target site.

[0009] In several embodiments, the cytotoxic receptor targets one or more of ligands of NKG2D, CD19, CD70, BCMA, CD38, GPRC5D, CD138, DLL3, EGFR, PSMA, FLT3, KREMEN2, or any combination thereof expressed by target tumor cells. However, in several embodiments, the cells are not engineered to express a cytotoxic receptor complex that targets CD70. In several embodiments, the cells are not engineered to express a cytotoxic receptor complex that targets CD19. In additional embodiments, the cells are not engineered to express a cytotoxic receptor complex that targets ligands of an NKG2D receptor.

[0010] In several embodiments, several embodiments, at least a portion of the genetically engineered immune cells are engineered to express membrane bound IL-15. In several embodiments, a fusion of mblL15 with a native receptor (e.g., an IL-15 receptor unit or subunit) are provided for. In several embodiments, the genetically engineered and edited immune cells are suitable for use in allogeneic cancer cell therapy with reduced risk of graft versus host disease and/or with greater cytotoxicity directed against the tumor cells (thereby resulting in a more efficacious therapy).

[0011] Methods for treatment of cancer in a subject are provided for herein, and in several embodiments, comprise administering to the subject at least a portion of a population of genetically engineered and gene edited immune cells as provided for herein. Also provided for is the use of genetically engineered and edited immune cells as provided for herein for the treatment of cancer and/or for the preparation of a medicament for the treatment of cancer.

[0012] Also provided for herein are methods of manufacturing a population of genetically edited immune cells for cancer immunotherapy, comprising contacting the population of immune cells with a first gene editing complex, wherein the first gene editing complex edits at one or more target sites in a CISH gene of the immune cell to yield reduced levels of expression of CIS protein encoded by the CISH gene as compared to an immune cell not edited at the CISH gene, and contacting the population of immune cells with a second gene editing complex, wherein the second gene editing complex edits at one or more target sites in an additional gene of the immune cell to yield reduced levels of expression of a protein encoded by the additional gene as compared to an immune cell not edited at the additional gene, and wherein the genetically edited immune cells exhibit one or more of enhanced expansion capability, enhanced cytotoxicity against target cells, and enhanced persistence, as compared to immune cells that do not comprise said genetically edited target site or sites.

[0013] In several embodiments, the wherein the second gene editing complex edits at one or more target sites in CBLB gene of the immune cell to yield reduced levels of expression of CBLB protein encoded by the CBLB gene as compared to an immune cell not edited at the CBLB gene. In several embodiments, the second gene editing complex edits at one or more target sites in a TGFBR2 gene of the immune cell to yield reduced levels of expression of TGFBR2 protein encoded by the TGFBR2 gene as compared to an immune cell not edited at the TGFBR2 gene. In several embodiments, the second gene editing complex edits at one or more target sites in a TIGIT gene of the immune cell to yield reduced levels of expression of TIGIT protein encoded by the TIGIT gene as compared to an immune cell not edited at the TIGIT gene. As discussed herein, combinations of edits are provided for as well. In several embodiments, an additional edit in one or more genes encoding one of ADARA2, SMAD3, MAPKAPK3, CEACAMI, DDIT4, NKG2A, SOCS2, B2M, PD-1, TIM-3, CD38, or TCR alpha.

[0014] In several embodiments, the method further comprise contacting at least a portion of the population of immune cells with a vector comprising a polynucleotide encoding a cytotoxic receptor comprising an extracellular ligand binding domain, a transmembrane domain, and a cytotoxic signaling complex. In several embodiments, the cytotoxic receptor targets one or more of ligands of NKG2D, CD19, CD70, BCMA, CD38, GPRC5D, CD138, DLL3, EGFR, PSMA, FLT3, KREMEN2, or any combination thereof expressed by target tumor cells. However, in several embodiments, the cytotoxic receptor does not target CD70, does not target CD19, and/or does not target NKG2D ligands. Further, in some embodiments, the method does not comprise editing a gene encoding CD70.

[0015] In several embodiments, there is a provided a method for treating cancer in a subject comprising, administering to the subject a population of genetically engineered immune cells, wherein the immune cells express a cytotoxic receptor comprising an extracellular ligand binding domain, a transmembrane domain, and a cytotoxic signaling complex, wherein the immune cells are genetically edited at one or more target locations in a CISH gene that encodes a CIS protein, wherein the edits yield reduced expression and/or function of CIS as compared to an immune cell not edited at the location or locations in the CISH gene, wherein the immune cells are edited at one or more a CBLB gene, a TGFBR2 gene, and/or a TIGIT gene, to yield reduced levels of expression or activity of a CBLB protein, a TGFBR2 protein and/or a TIGIT protein as compared to an immune cell not edited at a CBLB gene, a TGFBR2 gene or a TIGIT gene, and wherein the genetically engineered and edited immune cells exhibit one or more of enhanced expansion capability, enhanced cytotoxicity against target cells, and enhanced persistence, as compared to immune cells that do not comprise said genetically edited target site or sites.

[0016] In several embodiments, the method further comprises editing the immune cells at least one additional target gene. In several embodiments, the at least one additional target gene is not a gene encoding CD70. In several embodiments, the additional target gene encodes ADAR2A, SMAD3, MAPKAPK3, CEACAM1, DDIT4, NKG2A, SOCS2, B2M, PD-1, TIM-3, CD38, or TCR alpha. In several embodiments, the cytotoxic receptor expressed by the immune cells binds to one or more epitopes of CD19, CD70, BCMA, CD38, GPRC5D, CD138, DLL3, EGFR, PSMA, FLT3, KREMEN2, or combinations thereof. However, in some embodiments, the cytotoxic receptor expressed by the immune cells does not target any of CD19, CD70 or ligands of NKG2D.

[0017] In several embodiments, the immune cells comprise Natural Killer (NK) cells, T cells, induced pluripotent stem cells (iPSCs), iPSC-derived NK cells, NK-92 cells, or combinations thereof. In several embodiments, the immune cells comprise a mixture of NK cells and T cells or a mixture of iPSC-derived NK cells and T cells. In several embodiments, the immune cells comprise a purified or substantially purified population of NK cells. In several embodiments, the administered immune cells are allogeneic with respect the subject. In several embodiments, the method further comprises administering IL2.

[0018] In several embodiments, there is provided a population of genetically engineered and gene edited immune cells, comprising genetically engineered immune cells that express a cytotoxic receptor comprising an extracellular ligand binding domain, a transmembrane domain, and a cytotoxic signaling complex, wherein the extracellular ligand binding domain targets a tumor marker expressed by a target tumor cell, wherein at least a portion of the genetically engineered immune cells are engineered to express membrane bound IL-15, wherein the immune cells are genetically edited at one or more target sites in the genome of the immune cell to yield reduced levels of expression of the protein which is encoded by a gene which comprises an edited target site as compared to a non-edited immune cell, and wherein the genetically engineered and edited immune cells exhibit one or more of enhanced expansion capability, enhanced cytotoxicity against target cells, and enhanced persistence, as compared to immune cells that do not comprise said genetically edited target site or sites. In several embodiments, the immune cells are genetically edited at a target site in a gene encoding an adenosine A2 receptor to yield reduced levels of adenosine receptor A2 expression as compared to a non-edited immune cell, and wherein a guide sequence of any of SEQ ID NO: 503-506 is used to target the adenosine receptor A2 gene. In several embodiments, the cells are further edited at a gene encoding one or more of CISH, SMAD3, MAPKAPK3, CEACAM1, DDIT4, TGFBR2R, NKG2A, SOCS2, CBLB, B2M, TIGIT, PD-1, TIM-3, CD38, and TCR alpha. For example, in several embodiments, the cells are further edited at: (i) a gene encoding CIS and wherein a guide sequence of any of SEQ ID NO: 562-565 is used to target the gene encoding CIS, (ii) a gene encoding SMAD3 and wherein a guide sequence of any of SEQ ID NO: 491-493 is used to target the SMAD3 gene, (iii) a gene encoding MAPKAPK3 and wherein a guide sequence of any of SEQ ID NO: 494-496 is used to target the MAPKAPK3 gene, (iv) a gene encoding CEACAM1 and wherein a guide sequence of any of SEQ ID NO: 497-499, (v) a gene encoding DDIT4 and wherein a guide sequence of any of SEQ ID NO: 500-502 is used to target the DDIT4 gene, (vi) a gene encoding TGFBR2 and wherein a guide sequence of any of SEQ ID NO: 544-547 is used to target the TGFBR2 gene, (vii) a gene encoding NKG2A and wherein a guide sequence of any of SEQ ID NO: 548-551 is used to target the NKG2A gene, (viii) a gene encoding SOCS2 and wherein a guide sequence of any of SEQ ID NO: 556-561 is used to target the SOCS2 gene, (ix) a gene encoding CBLB and wherein a guide sequence of any of SEQ ID NO: 552-555 is used to target the CBLB gene, (x) a gene encoding B2M and wherein a guide sequence of any of SEQ ID NO: 290-299 is used to target the B2M gene, (xi) a gene encoding TIGIT and wherein a guide sequence of any of SEQ ID NO: 507-510 is used to target the TIGIT gene, (xii) a gene encoding PD-1 and wherein a guide sequence of any of SEQ ID NO: 511-514 is used to target the PD-1 gene, (xiii) a gene encoding TIM-3 and wherein a guide sequence of any of SEQ ID NO: 515-518 is used to target the TIM-3 gene, (xiv) a gene encoding CD38 and wherein a guide sequence of any of SEQ ID NO: 519-522 is used to target the CD38 gene, and/or (xv) a gene encoding TCR alpha and wherein a guide sequence of any of SEQ ID NO: 566-569 is used to target the TCR alpha gene.

[0019] In several embodiments, the extracellular ligand binding domain comprises a receptor that is directed against a tumor marker selected from the group consisting of MICA, MICB, ULBP1, ULBP2, ULBP3, ULBP4, ULBP5, and ULBP6. For example, in some embodiments, the cytotoxic receptor expressed by the NK cells comprises (i) an NKG2D ligand-binding domain, (ii) a CD8 transmembrane domain, and (iii) a signaling complex that comprises an OX40 co-stimulatory subdomain and a CD3z co-stimulatory subdomain.

[0020] In some embodiments, the cytotoxic receptor targets one or more of NKG2D receptor ligands, CD19, CD70, BCMA, CD38, GPRC5D, CD138 DLL3, EGFR, PSMA, FLT3, or KREMEN2 expressed by target tumor cells. In several embodiments, the cytotoxic signaling complex comprises an OX40 subdomain or a 4-1 BB domain, and a CD3zeta subdomain.

[0021] In several embodiments, the population of immune cells comprise Natural Killer (NK) cells, T cells, induced pluripotent stem cells (iPSCs), iPSC-derived NK cells, NK-92 cells, or combinations thereof. In several embodiments, the immune cells are suitable for use in allogeneic cancer cell therapy with reduced risk of graft versus host disease and/or are suitable for use in allogeneic cancer cell therapy with reduced risk of cytotoxic activity between the genetically engineered immune cells. Methods for treatment of cancer by administering such cells are provided for herein, as is the use of such cells for the treatment of cancer or for the preparation of a medicament for the treatment of cancer.

[0022] Further provided for herein is a method of manufacturing a population of genetically engineered immune cells for cancer immunotherapy, comprising contacting a population of immune cells with a vector comprising a polynucleotide encoding a cytotoxic receptor comprising an extracellular ligand binding domain, a transmembrane domain, and a cytotoxic signaling complex; contacting the population of immune cells with a gene editing complex; wherein the gene editing complex edits at one or more target sites in the genome of the immune cell to yield reduced levels of expression of the protein which is encoded by a gene which comprises an edited target site as compared to a non-edited immune cell, and wherein the genetically engineered and edited immune cells exhibit one or more of enhanced expansion capability, enhanced cytotoxicity against target cells, and enhanced persistence, as compared to immune cells that do not comprise said genetically edited target site or sites. In several embodiments, an edit (or edits) is made in a gene encoding one or more of CISH, ADARA2, SMAD3, MAPKAPK3, CEACAM1, DDIT4, TGFBR2R, NKG2A, SOCS2, CBLB, B2M, TIGIT, PD-1, TIM-3, CD38, and TCR alpha.

[0023] Also provided for is a method for treating cancer in a subject comprising, administering to the subject a population of genetically engineered immune cells, wherein the immune cells express a cytotoxic receptor comprising an extracellular ligand binding domain, a transmembrane domain, and a cytotoxic signaling complex, wherein the cytotoxic signaling complex comprises an OX-40 subdomain and a CD3zeta subdomain, wherein the cells are engineered to express membrane bound IL-15, wherein the immune cells are genetically edited at one or more target sites in the genome of the immune cell to yield reduced levels of expression of the protein which is encoded by a gene which comprises an edited target site as compared to a non-edited immune cell, and wherein the genetically engineered and edited immune cells exhibit one or more of enhanced expansion capability, enhanced cytotoxicity against target cells, and enhanced persistence, as compared to immune cells that do not comprise said genetically edited target site or sites. In several embodiments, the cells are edited at least two genes selected from those genes encoding CISH, ADAR2A, SMAD3, MAPKAPK3, CEACAM1, DDIT4, TGFBR2R, NKG2A, SOCS2, CBLB, B2M, TIGIT, PD-1, TIM-3, CD38, or TCR alpha. In several embodiments, the cytotoxic receptor comprises (i) an NKG2D ligand-binding domain or a binding domain that binds to one or more epitopes of CD19, CD70, BCMA, CD38, GPRC5D, CD138 DLL3, EGFR, PSMA, FLT3, or KREMEN2 expressed by target tumor cells, (ii) a CD8 transmembrane domain, and (iii) a signaling complex that comprises an OX40 co-stimulatory subdomain and a CD3z co-stimulatory subdomain. In several embodiments, the immune cells comprise Natural Killer (NK) cells, T cells, induced pluripotent stem cells (iPSCs), iPSC-derived NK cells, NK-92 cells, or combinations thereof. Additionally, in several embodiments, the administered immune cells are allogeneic with respect the subject.

[0024] Provided for in several embodiments is a population of genetically engineered immune cells for cancer immunotherapy, comprising genetically engineered immune cells that express a cytotoxic receptor comprising an extracellular ligand binding domain, a transmembrane domain, and a cytotoxic signaling complex, wherein at least a portion of the genetically engineered immune cells are engineered to express membrane bound IL-15, wherein the genetically engineered immune cells are engineered to express at least one immunosuppressive effector, wherein the at least one immunosuppressive effector exerts suppressive effects on undesired cytotoxic activity of suppressive cells, and wherein the genetically engineered immune cells exhibit one or more of enhanced expansion capability, enhanced cytotoxicity against target cells, and enhanced persistence, as compared to cells that do not comprise said immunosuppressive effector. In several embodiments, the population comprises one or more of genetically engineered NK cells and genetically engineered T cells. In several embodiments, the suppressive cells comprise host cells or one or more of non-engineered natural killer cells, non-engineered T cells, or suppressive engineered cells. In several embodiments, the cells that do not comprise said immunosuppressive effector are either non-engineered or engineered cells.

[0025] In several embodiments, the genetically engineered immune cells are also genetically edited to reduce expression of beta-2 microglobulin (B2M), and wherein the reduced expression of B2M enables the immune cells to be used in allogeneic cancer immunotherapy with reduced host versus graft rejection as compared to immune cells expressing endogenous levels of B2M.

[0026] In several embodiments, the at least one immunosuppressive effector comprises a virally-derived peptide, optionally derived from a retrovirus, optionally derived from an envelope protein of a retrovirus. In some embodiments, the at least one immunosuppressive effector is bound to an extracellular membrane of the immune cells, wherein the at least one immunosuppressive effector comprises a transmembrane protein, and wherein the transmembrane protein is selected from CD8α, CD4, CD3ε, CD3γ, CD3δ, CD3ζ, CD28, CD137, glycophorin A, glycophorin D, nicotinic acetylcholine receptor, a GABA receptor, FcεRIγ, and a T-cell receptor.

[0027] In several embodiments, the immunosuppressive effector comprises one or more peptides having at least 90% sequence identity to one or more of SEQ ID NOs: 199-215, 219, 220, 223, 225, 228, 230, 235, 238, 240, 243, 250, or 253. In several embodiments, the at least one immunosuppressive effector comprises at least a portion of a human protein and/or at least a portion of a human protein complex. In several embodiments, the immunosuppressive effector comprises a peptide having at least 90% sequence identity to one or more of SEQ ID NO: 248, 245, 273, 276, 278, 279, 286, 287, 288, and 289. In several embodiments, the at least one immunosuppressive effector comprises a chimeric construct comprises at least one virally-derived peptide and at least a portion of a human protein and/or at least a portion of a human protein complex. In several embodiments, the chimeric immunosuppressive effector construct comprises: (i) two or more of a truncated human CD47, a p15E peptide, an HIV peptide, and an HTLV peptide, (ii) a truncated human CD47 domain and at least one p15E peptide, an HIV peptide, and an HTLV peptide, (iii) a truncated human CD47 domain and at least one HIV peptide, (iv) a truncated human CD47 domain and at least HTLV peptide, (v) a sequence having at least 95% sequence identity to one or more of SEQ ID Nos: 256, 259, 262, 265, 268, 271, (vi) a viral UL18 protein. In several embodiments, the chimeric immunosuppressive effector construct comprises a viral UL18 protein and has a sequence having at least 95% sequence identity to SEQ ID NO: 280, or wherein the chimeric immunosuppressive effector construct comprises a viral UL18 protein and a human B2M domain and comprises a sequence having at least 95% sequence identity to SEQ ID NO: 283 or 285. In several embodiments, the immunosuppressive effector construct is integrated into the cytotoxic receptor between the transmembrane domain and the extracellular ligand-binding domain, within the extracellular ligand-binding domain, into a linker region of an scFv when the extracellular ligand-binding domain comprises an scFv and the chimeric immunosuppressive effector construct is integrated into a linker region of the scFv, within an N-terminal region of the cytotoxic receptor distally positioned from the extracellular ligand-binding domain, or at a plurality of locations within an extracellular region of the cytotoxic receptor. In several embodiments, the at least one chimeric immunosuppressive effector construct is bound to an extracellular membrane of the immune cells. In several embodiments, the cytotoxic receptor comprises at least one immunosuppressive effector and the genetically engineered immune cells express at least one membrane-bound immunosuppressive effector.

[0028] In several embodiments, the genetically engineered immune cells are suitable for use in allogeneic cancer cell therapy with reduced risk of graft versus host disease. In additional embodiments, the genetically engineered immune cells are suitable for use in allogeneic cancer cell therapy with reduced risk of cytotoxic activity between the genetically engineered immune cells.

[0029] Provided for herein also is a method of manufacturing a population of genetically engineered immune cells for cancer immunotherapy, comprising contacting a population of immune cells with a polynucleotide encoding a cytotoxic receptor comprising an extracellular ligand binding domain, a transmembrane domain, and a cytotoxic signaling complex, contacting the population of immune cells with an additional polynucleotide encoding at least one immunosuppressive effector, wherein the at least one immunosuppressive effector exerts suppressive effects on the cytotoxic activity of suppressive cells, and wherein the genetically engineered immune cells exhibit one or more of enhanced expansion capability, enhanced cytotoxicity against target cells, and enhanced persistence, as compared to cells that do not comprise said at least one immunosuppressive effector.

[0030] Also provided is a method of engineering a population of genetically engineered immune cells for cancer immunotherapy, comprising contacting a population of immune cells with a polynucleotide encoding a cytotoxic receptor comprising an extracellular ligand binding domain, a transmembrane domain, and a cytotoxic signaling complex and encoding at least one immunosuppressive effector, wherein the at least one immunosuppressive effector exerts suppressive effects on the cytotoxic activity of suppressive cells, and wherein the genetically engineered immune cells exhibit one or more of enhanced expansion capability, enhanced cytotoxicity against target cells, and enhanced persistence, as compared to cells that do not comprise said at least one immunosuppressive effector. In several embodiments, the polynucleotide further encodes membrane-bound IL15. In several embodiments, the method further comprises contacting the population of immune cells with a polynucleotide encoding a membrane-bound immunosuppressive effector.

[0031] In several embodiments, there is provided a method of reducing fratricide among a mixed population of genetically engineered immune cells for cancer immunotherapy, comprising contacting a first subpopulation of immune cells from a population of mixed immune cells with a polynucleotide encoding at least one immunosuppressive effector, wherein expression of the at least one immunosuppressive effector by the first subpopulation of immune cells reduces suppressive activity of a second subpopulation of immune cells that are directed against the first subpopulation of immune cells and contacting the second subpopulation from a population of mixed immune cells with a polynucleotide encoding at least an additional immunosuppressive effector, wherein expression of the at least an additional immunosuppressive effector by the second subpopulation of immune cells reduces suppressive activity of the first subpopulation of immune cells that are directed against the second subpopulation of immune cells, and wherein the expression of the immunosuppressive effector by the first subpopulation and the second subpopulation reduces fratricide among the cells within the population of genetically engineered immune cells.

[0032] A method of engineering a population of genetically engineered immune cells for enhanced allogeneic cancer immunotherapy, is also provided and comprises, in several embodiments, genetically editing a mixed population of immune cells comprising NK cells and T cells to reduce expression Human Leukocyte Antigen (HLA) on the surface of the immune cells, wherein reduced expression of HLA on the surface of the immune cells reduces T cell-mediated cytotoxicity against the edited population of immune cells, wherein reduced expression of HLA on the surface of the cells renders the edited population of immune cells susceptible to NK-mediated cytotoxicity against the edited immune cells; and genetically engineering the edited cells to express one or more immunosuppressive effectors that reduce NK-mediated cytotoxicity against the mixed population of immune cells, wherein the one or more immunosuppressive effectors comprises one or more of a viral immunosuppressive peptide, a viral protein that is an HLA homolog, HLA-E, HLA-G, a human protein or fragment thereof that reduces phagocytosis of cells, a chimeric construct comprising a viral immunosuppressive peptide and a human protein or fragment thereof that reduces phagocytosis of cells, or combinations thereof, wherein the reduced T cell-mediated cytotoxicity reduces engineered T cell-mediated fratricidal cytotoxicity against engineered NK cells and, upon administration, host T-cell mediated cytotoxicity against engineered NK cells, and wherein the wherein the reduced NK cell-mediated cytotoxicity reduces engineered NK cell-mediated fratricidal cytotoxicity against engineered T cells and, upon administration, host NK cell-mediated cytotoxicity against engineered NK and engineered T cells, thereby allowing for enhanced persistence of the engineering mixed population of immune cells upon administration to an allogeneic subject and allowing for enhanced allogeneic cancer immunotherapy. In several embodiments, the method further comprises genetically editing the DNA of the genetically engineered immune cells to alter the expression of one or more of a CISH gene, a B2M gene, a CD70 gene, an adenosine receptor gene, an NKG2A gene, a CIITA gene, a TGFBR gene, or any combination thereof.

[0033] There is provided for herein, in several embodiments, a population of genetically engineered and gene edited immune cells, comprising genetically engineered immune cells that express a cytotoxic receptor comprising an extracellular ligand binding domain, a transmembrane domain, and a cytotoxic signaling complex, wherein the extracellular ligand binding domain targets a tumor marker expressed by a target tumor cell, wherein the immune cells are genetically edited at one or more target locations in a CISH gene that encodes a CIS protein, wherein the edits yield reduced expression and/or function of CIS as compared to an immune cell not edited at the location or locations in the CISH gene, wherein the immune cells are edited at one or more additional target sites in the genome of the immune cell to yield reduced levels of expression of the protein which is encoded by a gene which comprises an edited target site as compared to a non-edited immune cell, wherein the edits to the CISH gene and the one or more additional target sites are made using a Crispr/Cas9 system, a Crispr/CasX system, a Crispr/CasY system, or another an RNA-guided endonuclease, and wherein the genetically engineered and edited immune cells exhibit one or more of enhanced expansion capability, enhanced cytotoxicity against target cells, and enhanced persistence, as compared to immune cells that do not comprise said genetically edited target site or sites. In several embodiments, a guide sequence of any of SEQ ID NO: 153-157 or 562-565 is used to target the CISH gene.

[0034] In several embodiments, the cells are edited at an additional target site in a CBLB gene to yield cells comprising edits within at least CISH and CBLB. In several embodiments, a guide sequence of any of SEQ ID NO: 164 to 166 or 552-555 is used to target the CBLB gene.

[0035] In several embodiments, the cells are edited at an additional target site in a TGFBR2 gene to yield cells comprising edits within at least CISH and TGFBR2. In several embodiments, a guide sequence of any of SEQ ID NO: 147 to 152 or 544-547 is used to target the TGFBR2 gene.

[0036] In several embodiments, the cells are edited at an additional target site in a TIGIT gene to yield cells comprising edits within at least CISH and TIGIT. In several embodiments, a guide sequence of any of SEQ ID NO: 507-510 is used to target the TIGIT gene.

[0037] In several embodiments, the population of genetically engineered and gene edited immune are not edited at a CD70 gene target site. In several embodiments, however, they are edited at CD70 and also at one or more additional genes, for example CD70/CISH/CBLB, CD70/CISH/TGFBR2, CD70/CISH/TIGIT, and the like. Any combination of target genes may be edited according to embodiments disclosed herein

[0038] In several embodiments, at least a portion of the genetically engineered immune cells are engineered to express membrane bound IL-15.

[0039] In several embodiments, the population of genetically engineered and gene edited immune cells are not engineered to express a cytotoxic receptor complex that targets CD70. In several embodiments, the cells are not engineered to express a cytotoxic receptor complex that targets CD19. In several embodiments, the cells are not engineered to express a cytotoxic receptor complex that targets ligands of an NKG2D receptor. However, in several embodiments, the cells are engineered to express an anti-CD70 CAR encoded by a polynucleotide at least 95% identical to one or more of SEQ ID NOs: 300-382. In several embodiments, the polynucleotide encodes an amino acid sequence at least 95% identical to one or more of SEQ ID NO: 383-465. In several embodiments, the cells are engineered to express an anti-CD70 CAR at least 95% identical to one or more of SEQ ID NO: 912-985. In several embodiments, the cells are engineered to express an anti-CD19 CAR encoded by a polynucleotide at least 95% identical to one or more of SEQ ID NOs: 175, 177, 179, 181, 183, 185, 187, 189, 191, 193, 195, or 197. In several embodiments, the cells are engineered to express an anti-CD19 CAR at least 95% identical to one or more of SEQ ID NO: 900-911. In several embodiments, the cells are engineered to express a chimeric receptor that targets NKG2D ligands encoded by a polynucleotide at least 95% identical to SEQ ID NO: 475. In several embodiments, the cells are engineered to express a chimeric receptor that targets NKG2D ligands at least 95% identical to SEQ ID NO. 899.

[0040] In several embodiments, the cells are further edited at a one or more genes encoding an adenosine A2 receptor, SMAD3, MAPKAPK3, CEACAM1, DDIT4, TGFBR2R, NKG2A, SOCS2, B2M, TIGIT, PD-1, TIM-3, CD38, or TCR alpha.

[0041] In several embodiments, the cells are further edited at a gene encoding an adenosine A2 receptor and the nuclease is guided to the adenosine A2 receptor target sequence of any of SEQ ID NO: 503-506. In several embodiments, the cells are further edited at a gene encoding SMAD3 and the nuclease is guided to the target sequence of any of SEQ ID NO: 491-493. In several embodiments, the cells are further edited at a gene encoding MAPKAPK3 and the nuclease is guided to the target sequence of any of SEQ ID NO: 494-496. In several embodiments, the cells are further edited at a gene encoding CEACAMI and the nuclease is guided to the target sequence of any of SEQ ID NO: 497-499. In several embodiments, the cells are further edited at a gene encoding DDIT4 and the nuclease is guided to the target sequence of any of SEQ ID NO: 500-502. In several embodiments, the cells are further edited at a gene encoding NKG2A and the nuclease is guided to the target sequence of any of SEQ ID NO: 548-551. In several embodiments, the cells are further edited at a gene encoding SOCS2 and the nuclease is guided to the target sequence of any of SEQ ID NO: 556-561. In several embodiments, the cells are further edited at a gene encoding B2M and the nuclease is guided to the target sequence of any of SEQ ID NO: 290-299. In several embodiments, the cells are further edited at a gene encoding PD-1 and the nuclease is guided to the target sequence of any of SEQ ID NO: 511-514. In several embodiments, the cells are further edited at a gene encoding TIM-3 and the nuclease is guided to the target sequence of any of SEQ ID NO: 515-518. In several embodiments, the cells are further edited at a gene encoding CD38 and the nuclease is guided to the target sequence of any of SEQ ID NO: 519-522. In several embodiments, the cells are further edited at a gene encoding TCR alpha and the nuclease is guided to the target sequence of any of SEQ ID NO: 566-569.

[0042] Depending on the embodiment, the population of genetically engineered and gene edited immune cells may comprise Natural Killer (NK) cells, T cells, induced pluripotent stem cells (iPSCs), iPSC-derived NK cells, NK-92 cells, or combinations thereof. In several embodiments, the genetically engineered and edited immune cells are suitable for use in allogeneic cancer cell therapy with reduced risk of graft versus host disease.

[0043] Also provided for herein is a method for the treatment of cancer in a subject comprising administering to the subject at least a portion of population of immune cells according to embodiments discussed herein. Likewise, provided for is the use of use of genetically engineered and edited immune cells provided for herein for the treatment of cancer and/or for the preparation of a medicament for the treatment of cancer.

[0044] Also provided for herein is a method of manufacturing a population of genetically edited immune cells for cancer immunotherapy, comprising contacting the population of immune cells with a first Cas-gRNA ribonucleoprotein complex (RNP), wherein the RNP edits at one or more target sites in a CISH gene of the immune cell to yield reduced levels of expression of CIS protein encoded by the CISH gene as compared to an immune cell not edited at the CISH gene, wherein the Cas of the RNP comprises Cas9, CasX, CasY, or combinations thereof, and contacting the population of immune cells with a second RNP complex, wherein the second RNP edits at one or more target sites in CBLB gene of the immune cell to yield reduced levels of expression of CBLB protein encoded by the CBLB gene as compared to an immune cell not edited at the CBLB gene, wherein the Cas of the RNP comprises Cas9, CasX, CasY, or combinations thereof and wherein the genetically edited immune cells exhibit one or more of enhanced expansion capability, enhanced cytotoxicity against target cells, and enhanced persistence, as compared to immune cells that do not comprise said genetically edited target site or sites.

[0045] Also provided for herein is a method of manufacturing a population of genetically edited immune cells for cancer immunotherapy, comprising contacting the population of immune cells with a first Cas-gRNA ribonucleoprotein complex (RNP), wherein the RNP edits at one or more target sites in a CISH gene of the immune cell to yield reduced levels of expression of CIS protein encoded by the CISH gene as compared to an immune cell not edited at the CISH gene, wherein the Cas of the RNP comprises Cas9, CasX, CasY, or combinations thereof, and contacting the population of immune cells with a second RNP complex, wherein the second RNP edits at one or more target sites in a TGFBR2 gene of the immune cell to yield reduced levels of expression of TGFBR2 protein encoded by the TGFBR2 gene as compared to an immune cell not edited at the TGFBR2 gene, wherein the Cas of the RNP comprises Cas9, CasX, CasY, or combinations thereof and wherein the genetically edited immune cells exhibit one or more of enhanced expansion capability, enhanced cytotoxicity against target cells, and enhanced persistence, as compared to immune cells that do not comprise said genetically edited target site or sites.

[0046] Also provided for herein is a method of manufacturing a population of genetically edited immune cells for cancer immunotherapy, comprising contacting the population of immune cells with a first Cas-gRNA ribonucleoprotein complex (RNP), wherein the RNP edits at one or more target sites in a CISH gene of the immune cell to yield reduced levels of expression of CIS protein encoded by the CISH gene as compared to an immune cell not edited at the CISH gene, wherein the Cas of the RNP comprises Cas9, CasX, CasY, or combinations thereof, and contacting the population of immune cells with a second RNP complex, wherein the second RNP edits at one or more target sites in a TIGIT gene of the immune cell to yield reduced levels of expression of TIGIT protein encoded by the TIGIT gene as compared to an immune cell not edited at the TIGIT gene, wherein the Cas of the RNP comprises Cas9, CasX, CasY, or combinations thereof and wherein the genetically edited immune cells exhibit one or more of enhanced expansion capability, enhanced cytotoxicity against target cells, and enhanced persistence, as compared to immune cells that do not comprise said genetically edited target site or sites.

[0047] Also provided for herein is a method of manufacturing a population of genetically edited immune cells for cancer immunotherapy, comprising contacting the population of immune cells with a first Cas-gRNA ribonucleoprotein complex (RNP), wherein the RNP edits at one or more target sites in a CISH gene of the immune cell to yield reduced levels of expression of CIS protein encoded by the CISH gene as compared to an immune cell not edited at the CISH gene, wherein the Cas of the RNP comprises Cas9, CasX, CasY, or combinations thereof, and contacting the population of immune cells with a second RNP complex, wherein the second RNP edits at one or more target sites in an additional gene of the immune cell to yield reduced levels of expression of a protein encoded by the additional gene as compared to an immune cell not edited at the additional gene, wherein the Cas of the RNP comprises Cas9, CasX, CasY, or combinations thereof, and wherein the genetically edited immune cells exhibit one or more of enhanced expansion capability, enhanced cytotoxicity against target cells, and enhanced persistence, as compared to immune cells that do not comprise said genetically edited target site or sites.

[0048] In several embodiments, the methods further comprise contacting the population of immune cells with a vector comprising a polynucleotide encoding a cytotoxic receptor comprising an extracellular ligand binding domain, a transmembrane domain, and a cytotoxic signaling complex. In several embodiments, the cytotoxic receptor does not target CD70. In other embodiments, the cytotoxic receptor does target CD70. In several embodiments, the methods do not comprise editing a gene encoding CD70. In some embodiments, at least CD70 is edited. In several embodiments, the cytotoxic receptor does not target CD19. In several embodiments, the cytotoxic receptor does target CD19. In several embodiments, the cytotoxic receptor does not target NKG2D ligands. In several embodiments, the cytotoxic receptor does target NKG2D ligands.

[0049] In several embodiments, the method further comprises making an additional edit in one or more genes encoding one of ADARA2, SMAD3, MAPKAPK3, CEACAM1, DDIT4, TGFBR2R, NKG2A, SOCS2, B2M, PD-1, TIM-3, CD38, or TCR alpha.

[0050] In several embodiments, the cytotoxic receptor targets one or more of ligands of NKG2D, CD19, CD70, BCMA, CD38, GPRC5D, CD138 DLL3, EGFR, PSMA, FLT3, KREMEN2, or any combination thereof expressed by target tumor cells. Depending on the embodiments, the immune cells can comprise Natural Killer (NK) cells, T cells, induced pluripotent stem cells (iPSCs), iPSC-derived NK cells, NK-92 cells, or combinations thereof.

[0051] In several embodiments, there is provided a method for treating cancer in a subject comprising administering to the subject a population of genetically engineered immune cells, wherein the immune cells express a cytotoxic receptor comprising an extracellular ligand binding domain, a transmembrane domain, and a cytotoxic signaling complex, wherein the immune cells are genetically edited at one or more target locations in a CISH gene that encodes a CIS protein, wherein the edits yield reduced expression and/or function of CIS as compared to an immune cell not edited at the location or locations in the CISH gene, wherein the immune cells are edited at one or more a CBLB gene, a TGFBR2 gene, and/or a TIGIT gene, to yield reduced levels of expression or activity of a CBLB protein, a TGFBR2 protein and/or a TIGIT protein as compared to an immune cell not edited at a CBLB gene, a TGFBR2 gene or a TIGIT gene, wherein the edits are made using an RNA-guided endonuclease, and wherein the genetically engineered and edited immune cells exhibit one or more of enhanced expansion capability, enhanced cytotoxicity against target cells, and enhanced persistence, as compared to immune cells that do not comprise said genetically edited target site or sites.

[0052] In several embodiments, the RNA-guided endonuclease is a Crispr/CasX, Crispr/CasY, or Crispr/Cas9 system. In several embodiments, the method further comprises editing the immune cells at least one additional target gene. In some embodiments, the at least one additional target gene is not a gene encoding CD70. In several embodiments, the cells are edited at an additional target gene encoding ADAR2A, SMAD3, MAPKAPK3, CEACAM1, DDIT4, NKG2A, SOCS2, B2M, PD-1, TIM-3, CD38, or TCR alpha. In several embodiments, the cytotoxic receptor expressed by the immune cells does not target CD70, does not target CD19, or does not target NKG2D ligands. However, in several embodiments, the cytotoxic receptor expressed by the immune cells binds to one or more epitopes of CD19, CD70, BCMA, CD38, GPRC5D, CD138 DLL3, EGFR, PSMA, FLT3, KREMEN2, or combinations thereof.

[0053] In several embodiments, the immune cells comprise Natural Killer (NK) cells, T cells, induced pluripotent stem cells (iPSCs), iPSC-derived NK cells, NK-92 cells, or combinations thereof. In several embodiments, the immune cells comprise a mixture of NK cells and T cells or a mixture of iPSC-derived NK cells and T cells. In several embodiments, the administered immune cells are allogeneic with respect the subject. In several embodiments, the method further comprises administering IL2.

[0054] In several embodiments, there is therefore provided a population of genetically engineered immune cells for cancer immunotherapy, comprising genetically engineered immune cells that express a cytotoxic receptor, wherein the immune cells are genetically edited at one or more target sites in the genome of the immune cell to yield reduced levels of expression of a protein encoded by the edited gene, wherein the genetically engineered immune cells are also engineered to express at least one immunosuppressive effector that exerts suppressive effects on the cytotoxic activity of natural killer cells and/or T cells, and wherein the resulting genetically engineered and edited immune cells exhibit one or more of enhanced expansion capability, enhanced cytotoxicity against target cells, and enhanced persistence, as compared to cells that do not comprise said immunosuppressive effector and said edited gene.

[0055] Also provided for herein is a population of genetically engineered immune cells for cancer immunotherapy, comprising one or more of genetically engineered NK cells and genetically engineered T cells, wherein the genetically engineered immune cells are engineered to express a cytotoxic receptor, herein the immune cells are genetically edited at one or more target sites in the genome of the immune cell to yield reduced levels of expression of a protein which is encoded by an edited gene (or genes), wherein the genetically engineered immune cells are further genetically engineered to express at least one immunosuppressive effector that exerts suppressive effects on the cytotoxic activity of undesired cells, such as non-engineered natural killer cells, non-engineered T cells, or undesired engineered cells, and wherein the genetically engineered and edited immune cells exhibit one or more of enhanced expansion capability, enhanced cytotoxicity against target cells, and enhanced persistence, as compared to cells that do not comprise said immunosuppressive effector and said edited gene.

[0056] Further provided for herein is a population of genetically engineered immune cells for cancer immunotherapy, comprising one or more of genetically engineered NK cells and genetically engineered T cells, wherein the plurality of genetically engineered immune cells are engineered to express a cytotoxic receptor, wherein the immune cells are also genetically edited at one or more target sites in the genome to yield reduced levels of expression of a protein which is encoded by an edited gene which comprises an edited target site as compared to a non-edited immune cell, wherein immune cells are further genetically engineered to express at least one immunosuppressive effector configured to produce suppressive effects on undesired cytotoxic activity of suppressive cells, and wherein the genetically engineered immune cells exhibit one or more of enhanced expansion capability, enhanced cytotoxicity against target cells, and enhanced persistence, as compared to cells that do not comprise said immunosuppressive effector.

[0057] In several embodiments, the suppressive cells comprise host cells. In several embodiments, the suppressive cells comprise one or more of non-engineered natural killer cells, non-engineered T cells, or suppressive engineered cells. In several embodiments, the suppressive engineered cells comprise the genetically engineered immune cells (e.g., other cells within the population of cells to be used for therapy). In several embodiments, the cells that do not comprise said immunosuppressive effector are either non-engineered (e.g., host cells) or engineered cells (other engineered cells that were not edited or engineered with the immunosuppressive effector).

[0058] In several embodiments, the cytotoxic receptor expressed by the cells is a chimeric antigen receptor or other chimeric receptor comprising an extracellular ligand binding domain, a transmembrane domain, and a cytotoxic signaling complex. In several embodiments, the cytotoxic signaling complex comprises an OX40 subdomain or a 4-1 BB domain, and a CD3zeta subdomain. In several embodiments, the cytotoxic receptor targets one or more of NKG2D, CD19, BCMA, CD70, and CD38 expressed by target tumor cells.

[0059] In several embodiments, the edits are made using a targeted endonuclease. In several embodiments, the endonuclease is an RNA-guided endonuclease. In several embodiments, the edits are made using a Crispr/Cas system.

[0060] According to some embodiments, the genetically engineered immune cells are also genetically edited to reduce expression of beta-2 microglobulin (B2M). In several embodiments, the reduced expression of B2M enables the immune cells to be used in allogeneic cancer immunotherapy with reduced host versus graft rejection as compared to immune cells expressing endogenous levels of B2M.

[0061] In several embodiments, the at least one immunosuppressive effector comprises a virally-derived peptide. In several embodiments, the immunosuppressive effector comprises a peptide derived from a retrovirus, such as a peptide derived from an envelope protein of a retrovirus. In additional embodiments, the at least one immunosuppressive effector comprises at least a portion of a human protein and/or at least a portion of a human protein complex. In several embodiments, the at least one immunosuppressive effector comprises at least a portion of human protein. In still further embodiments, the at least one immunosuppressive effector comprises a chimeric construct comprises at least one virally-derived peptide and at least a portion of a human protein and/or at least a portion of a human protein complex.

[0062] In several embodiments, the at least one immunosuppressive effector is integrated into the cytotoxic receptor at one or more positions within the receptor. For example, in several embodiments, the at least one immunosuppressive effector is integrated into the cytotoxic receptor between the transmembrane domain and the extracellular ligand-binding domain. In other embodiments, the at least one immunosuppressive effector is integrated into the cytotoxic receptor within the extracellular ligand-binding domain. In still further embodiments, when the wherein the extracellular ligand-binding domain comprises an scFv, the at least one immunosuppressive effector is integrated into a linker region of the scFv. In several embodiments, the at least one immunosuppressive effector is integrated into the cytotoxic receptor within an N-terminal region of the cytotoxic receptor distally positioned from the extracellular ligand-binding domain. In some embodiments, the at least one immunosuppressive effector is integrated into the cytotoxic receptor at a plurality of locations within an extracellular region of the cytotoxic receptor, for example, multiple copies of the effector are positioned at various locations within the receptor, inducing enhanced immunosuppressive effects.

[0063] In addition to, or in place of the effectors integrated into the receptor complex, in several embodiments, the at least one immunosuppressive effector is bound to an extracellular membrane of the immune cells. In several such embodiments, the at least one immunosuppressive effector comprises a transmembrane protein. Non-limiting examples of transmembrane proteins that can be used according to embodiments disclosed herein are CD8α, CD4, CD3ε, CD3γ, CD3δ, CD3ζ, CD28, CD137, glycophorin A, glycophorin D, nicotinic acetylcholine receptor, a GABA receptor, FcεRIγ, and a T-cell receptor. Combinations of transmembrane domains are used, according to several embodiments. In several embodiments, the transmembrane protein comprises a CD8α transmembrane protein. In additional embodiments, the at least one immunosuppressive effector is expressed on the immune cells by a disulfide trap single chain trimer (dtSCT).

[0064] In several embodiments, the immunosuppressive effector is encoded by a nucleic acid or comprises a peptide having at least 85% sequence identity to one or more of the nucleotide or amino acid sequences of SEQ ID NOs: 683-894. In several embodiments, the immunosuppressive effector comprises a peptide having at least 95% sequence identity to SEQ ID NO: 689. In several embodiments, the immunosuppressive effector is encoded by a nucleic acid having at least 95% sequence identity to SEQ ID NO: 690.

[0065] In several embodiments, the genetically engineered immune cells comprise genetically engineered Natural Killer (NK) cells, genetically engineered T cells, or combinations thereof. In several embodiments, the genetically engineered immune cells are suitable for use in allogeneic cancer cell therapy with reduced risk of graft versus host disease. Furthermore, in several embodiments, the genetically engineered immune cells are suitable for use in allogeneic cancer cell therapy with reduced risk of cytotoxic activity between the genetically engineered immune cells. In several embodiments, at least a portion (e.g., at least 50%, at least 60%, at least 75%, or more) of the genetically engineered immune cells are engineered to express membrane bound IL-15. In several embodiments, at least about 60% of the NK cells are positive for NKG2A. In several embodiments, at least about 80% of the NK cells are positive for NKG2A. In several embodiments, the elevated expression levels of NKG2A enhance the efficacy of the engineered and edited cells in cancer immunotherapy by virtue of reduced cytotoxicity within the cells of the population administered to a subject.

[0066] In several embodiments, there are also provided methods for the treatment of cancer in a subject comprising administering to the subject the genetically engineered and edited immune cells according to embodiments disclosed herein. In several embodiments, there is also provided for the use of the genetically engineered and edited immune cells according embodiments discussed herein for the treatment of cancer or for the preparation of a medicament for the treatment of cancer.

[0067] In several embodiments, there is provided a method of manufacturing a population of genetically engineered immune cells for cancer immunotherapy, comprising contacting a population of immune cells with an RNA-guided endonuclease to genetically edit one or more target sites in the genome of the immune cell to yield reduced levels of expression of a protein which is encoded by a gene which comprises an edited target site as compared to a non-edited immune cell; contacting the population of immune cells with a polynucleotide encoding a cytotoxic receptor comprising an extracellular ligand binding domain, a transmembrane domain, and a cytotoxic signaling complex; contacting the population of immune cells with an additional polynucleotide encoding at least one immunosuppressive effector, wherein the immunosuppressive effector is encoded by a nucleic acid or comprises a peptide having at least 85% sequence identity to one or more of the nucleotide or amino acid sequences of SEQ ID NOs: 683-894; wherein the at least one immunosuppressive effector exerts suppressive effects on the cytotoxic activity of suppressive cells, and wherein the genetically engineered immune cells exhibit one or more of enhanced expansion capability, enhanced cytotoxicity against target cells, and enhanced persistence, as compared to cells that do not comprise said at least one immunosuppressive effector. In several embodiments, the target of the genetic editing is one or more of a CISH gene, a B2M gene, a CD70 gene, an adenosine receptor gene, an NKG2A gene, a CIITA gene, a TGFBR gene, or any combination thereof.

[0068] Also provided for herein are methods of engineering a population of genetically engineered immune cells for enhanced allogeneic cancer immunotherapy, comprising genetically editing a mixed population of immune cells comprising NK cells and T cells to disrupt Beta-2 microglobulin (B2M) expression and coordinately reduce expression Human Leukocyte Antigen (HLA) on the surface of the immune cells, wherein reduced expression of HLA on the surface of the immune cells reduces T cell-mediated cytotoxicity against the edited population of immune cells, wherein reduced expression of HLA on the surface of the cells renders the edited population of immune cells susceptible to NK-mediated cytotoxicity against the edited immune cells, and genetically engineering the edited cells to express one or more immunosuppressive effectors that reduce NK-mediated cytotoxicity against the mixed population of immune cells, wherein the one or more immunosuppressive effectors comprises one or more of a viral immunosuppressive peptide, a viral protein that is an HLA homolog, HLA-E, HLA-G, a human protein or fragment thereof that reduces phagocytosis of cells, a chimeric construct comprising a viral immunosuppressive peptide and a human protein or fragment thereof that reduces phagocytosis of cells, or combinations thereof, wherein the reduced T cell-mediated cytotoxicity reduces engineered T cell-mediated fratricidal cytotoxicity against engineered NK cells and, upon administration, host T-cell mediated cytotoxicity against engineered NK cells, and wherein the wherein the reduced NK cell-mediated cytotoxicity reduces engineered NK cell-mediated fratricidal cytotoxicity against engineered T cells and, upon administration, host NK cell-mediated cytotoxicity against engineered NK and engineered T cells, thereby allowing for enhanced persistence of the engineering mixed population of immune cells upon administration to an allogeneic subject and allowing for enhanced allogeneic cancer immunotherapy. In several embodiments, at least about 60% of the NK cells in the mixed population are positive for NKG2A expression.

[0069] In several embodiments, the method further comprises contacting the mixed population of immune cells with a polynucleotide encoding a cytotoxic receptor comprising an extracellular ligand binding domain, a transmembrane domain, and a cytotoxic signaling complex. Depending on the embodiment, the polynucleotide encodes a cytotoxic receptor targeting one or more of NKG2D, CD19, CD70, BCMA, and CD38 expressed by target tumor cells.

[0070] In several embodiments, the method further comprises genetically editing the DNA of the genetically engineered immune cells to alter the expression of one or more of a CISH gene, a CD70 gene, an adenosine receptor gene, an NKG2A gene, a CIITA gene, a TGFBR gene, or any combination thereof. In several embodiments, the gene editing to reduce expression or the gene editing to induce expression is made using a CRISPR-Cas system. In several embodiments, the Cas is Cas9, Cas12, Cas13, CasX or CasY.

[0071] Based on the production methods disclosed herein, there is also provided for a population of genetically engineered immune cells, comprising one or more of genetically engineered NK cells and genetically engineered T cells, wherein at least about 70% of the genetically engineered NK cells express NKG2A, wherein the plurality of genetically engineered immune cells are engineered to express a cytotoxic receptor comprising an extracellular ligand binding domain, a transmembrane domain, and a cytotoxic signaling complex, wherein the genetically engineered immune cells are genetically engineered to express at least one immunosuppressive effector derived from a Human Leukocyte Antigen (HLA), wherein the at least one immunosuppressive effector exerts suppressive effects on undesired cytotoxic activity of suppressive cells, wherein, optionally, the genetically engineered immune cells are further engineered to express one or more of the following: IL-15, mblL-15, at least one viral immunosuppressive peptide integrated within an extracellular region, or extracellular regions, of the cytotoxic receptor, at least one viral immunosuppressive peptide expressed on a cell membrane of the genetically engineered immune cells, at least one portion of a human immunosuppressive protein or protein complex integrated within an extracellular region, or extracellular regions, of the cytotoxic receptor, at least one portion of a human immunosuppressive protein or protein complex expressed on a cell membrane of the genetically engineered immune cells, and/or at least one chimeric viral-human immunosuppressive construct expressed on a cell membrane of the genetically engineered immune cells and/or integrated at one or more extracellular regions of the cytotoxic receptor. In several embodiments, the immunosuppressive effector derived from an HLA comprises at least one HLA-E peptide.

[0072] In several embodiments there is provided herein a population of genetically engineered and gene edited immune cells, wherein the cells are genetically engineered in one or more respects and wherein the cells are also gene edited in one or respects. In several embodiments, the cells are genetically engineered to express one or more cytotoxic receptor that targets a tumor marker expressed by a target tumor cell. In several embodiments, the engineered immune cells are genetically edited at one or more target sites in the immune cell genome of the immune cell to yield reduced levels of expression of the protein which is encoded by the target gene which comprises an edited target site as compared to a non-edited immune cell, thereby altering one or more of the genotype, phenotype or function of the cell. In several embodiments, the genetic edits are made using a guided nuclease.

[0073] In several embodiments there is provided herein a population of genetically engineered and gene edited immune cells, comprising genetically engineered immune cells that express a cytotoxic receptor comprising an extracellular ligand binding domain, a transmembrane domain, and a cytotoxic signaling complex, wherein the extracellular ligand binding domain targets a tumor marker expressed by a target tumor cell. In several embodiments, the immune cells are genetically edited at one or more target sites in the genome of the immune cell to yield reduced levels of expression of the protein which is encoded by a gene which comprises an edited target site as compared to a non-edited immune cell. In several embodiments, the genetic edits are made using a CRISPR/CasX system. In several embodiments, the genetic edits are made using a CRISPR/CasY system. In several embodiments, the genetic edits are made using a CRISPR/Cas9 system. In several embodiments, the CRISPR/Cas systems used herein are configured to reduce potentially deleterious off-target effects. In several embodiments, the genetic edits are made using a non-Cas guided nuclease.

[0074] In several embodiments, at least a portion of the genetically engineered immune cells are engineered to express membrane bound IL-15.

[0075] In several embodiments, the genetically engineered and gene edited immune cells exhibit one or more of enhanced expansion capability, enhanced cytotoxicity against target cells, and enhanced persistence, as compared to immune cells that do not comprise genetically edited target site or sites.

[0076] In several embodiments, within the population of immune cells, the cells are edited at a gene encoding one or more of an adenosine A2 receptor CISH, SMAD3, MAPKAPK3, CEACAM1, DDIT4, TGFBR2, NKG2A, SOCS2, CBLB, B2M, TIGIT, PD-1, TIM-3, CD38, and TCR alpha to yield reduced levels of expression as compared to a non-edited immune cell. In several embodiments, within the population of immune cells, the nuclease is guided to the adenosine A2 receptor target sequence of any of SEQ ID NOs: 503-506. In several embodiments, within the population of immune cells, the cells are edited at a gene encoding CIS and the nuclease is guided to the target sequence of any of the SEQ ID NOs: 562-565. In several embodiments, within the population of immune cells, the cells are edited at a gene encoding SMAD3 and the nuclease is guided to the target sequence of any of the SEQ ID NOs: 491-493. In several embodiments, within the population of immune cells, the cells are edited at a gene encoding MAPKAPK3 and the nuclease is guided to the target sequence of any of the SEQ ID NOs: 494-496. In several embodiments, within the population of immune cells, the cells are edited at a gene encoding CEACAM1 and the nuclease is guided to the target sequence of any of the SEQ ID NOs: 497-499. In several embodiments, within the population of immune cells, the cells are edited at a gene encoding DDIT4 and the nuclease is guided to the target sequence of any of the SEQ ID NOs: 500-502. In several embodiments, within the population of immune cells, the cells are edited at a gene encoding TGFBR2 and the nuclease is guided to the target sequence of any of the SEQ ID NOs: 544-547. In several embodiments, within the population of immune cells, the cells are edited at a gene encoding NKG2A and the nuclease is guided to the target sequence of any of the SEQ ID NOs: 548-551. In several embodiments, within the population of immune cells, the cells are edited at a gene encoding SOCS2 and the nuclease is guided to the target sequence of any of the SEQ ID NOs: 556-561. In several embodiments, within the population of immune cells, the cells are edited at a gene encoding CBLB and the nuclease is guided to the target sequence of any of the SEQ ID NOs: 552-555. In several embodiments, within the population of immune cells, the cells are edited at a gene encoding B2M and the nuclease is guided to the target sequence of any of the SEQ ID NOs: 290-299. In several embodiments, within the population of immune cells, the cells are edited at a gene encoding TIGIT and the nuclease is guided to the target sequence of any of the SEQ ID NOs: 507-510. In several embodiments, within the population of immune cells, the cells are edited at a gene encoding PD-1 and the nuclease is guided to the target sequence of any of the SEQ ID NOs: 511-514. In several embodiments, within the population of immune cells, the cells are edited at a gene encoding TIM-3 and the nuclease is guided to the target sequence of any of the SEQ ID NOs: 515-518. In several embodiments, within the population of immune cells, the cells are edited at a gene encoding CD38 and the nuclease is guided to the target sequence of any of the SEQ ID NO: 519-522. In several embodiments, within the population of immune cells, the cells are edited at a gene encoding TCR alpha and the nuclease is guided to the target sequence of any of the SEQ ID NO: 566-569.

[0077] In several embodiments, the extracellular ligand binding domain comprises a receptor that is directed against at least one tumor marker selected from MICA, MICB, ULBP1, ULBP2, ULBP3, ULBP4, ULBP5, and ULBP6. In several embodiments the cytotoxic receptor expressed by NK cells comprises (i) an NKG2D ligand-binding domain, (ii) a CD8 transmembrane domain, and (iii) a signaling complex. In some embodiments, the cytotoxic signaling complex comprises an OX40 subdomain and/or a 4-1 BB domain, and a CD3zeta subdomain.

[0078] In several embodiments, the cytotoxic receptor targets one or more of NKG2D, CD19, CD70, BCMA, CD38, GPRCSD, CD138 DLL3, EGFR, PSMA, FLT3, ALPPL2, CLDN4, CLDN6, or KREMEN2 expressed by target tumor cells.

[0079] In several embodiments, the population of immune cells can comprise Natural Killer (NK) cells, T cells, induced pluripotent stem cells (iPSCs), iPSC-derived NK cells, NK-92 cells, or combinations thereof. In several embodiments, the population of immune cells comprise engineered and edited immune cells suitable for use in allogeneic cancer cell therapy with reduced risk of graft versus host disease. In several embodiments, the population of immune cells comprise engineered and edited immune cells suitable for use in allogeneic cancer cell therapy with reduced risk of cytotoxic activity between the genetically engineered immune cells. In several embodiments, the population of immune cells comprise engineered and edited immune cells for the treatment of cancer, or the preparation of a medicament for the treatment of cancer.

[0080] In several embodiments, there are provided methods for treating cancer in a subject comprising, administering to the subject a population of genetically engineered and gene edited immune cells.

[0081] In several embodiments there is provided herein a method of manufacturing a population of genetically engineered and gene edited immune cells, wherein the cells are genetically engineered in one or more respects and wherein the cells are also gene edited in one or respects. In several embodiments, the vector comprises a polynucleotide, wherein the polynucleotide encodes a cytotoxic receptor. In several embodiments, the cytotoxic receptor comprises an extracellular ligand binding domain, a transmembrane domain, and a cytotoxic signaling complex. In several embodiments, the method further includes contacting the population of immune cells with a Cas-gRNA ribonucleoprotein complex (RNP). In several embodiments, the RNP edits at one or more target sites in the genome of the immune cell to yield reduced levels of expression of the protein which is encoded by a gene which comprises an edited target site as compared to a non-edited immune cell.

[0082] Also provided for herein is a method of manufacturing a population of genetically engineered immune cells for cancer immunotherapy, comprising contacting a population of immune cells with a vector comprising a polynucleotide encoding a cytotoxic receptor comprising an extracellular ligand binding domain, a transmembrane domain, and a cytotoxic signaling complex, and contacting the population of immune cells with a Cas-gRNA ribonucleoprotein complex (RNP), wherein the RNP edits at one or more target sites in the genome of the immune cell to yield reduced levels of expression of the protein which is encoded by a gene which comprises an edited target site as compared to a non-edited immune cell, wherein the Cas of the RNP comprises Cas9, CasX, CasY, or combinations thereof, and wherein the genetically engineered and edited immune cells exhibit one or more of enhanced expansion capability, enhanced cytotoxicity against target cells, and enhanced persistence, as compared to immune cells not comprising genetically edited target sites.

[0083] In several embodiments, the method further includes gene edits that are made in a gene encoding one or more of CISH, ADARA2, SMAD3, MAPKAPK3, CEACAM1, DDIT4, TGFBR2, NKG2A, SOCS2, CBLB, B2M, TIGIT, PD-1, TIM-3, CD38, and TCR alpha. In several embodiments, the population of immune cells is contacted with a vector comprising a polynucleotide encoding a cytotoxic receptor comprising an extracellular ligand binding domain, a transmembrane domain, and a cytotoxic signaling complex, wherein the extracellular ligand binding domain comprises a receptor directed against a tumor marker selected from a group consisting of MICA, MICB, ULBP1, ULBP2, ULBP3, ULBP4, ULBP5, and ULBP6. In several embodiments, the population of immune cells is contacted with a vector comprising a polynucleotide encoding a cytotoxic receptor, wherein the cytotoxic receptor expressed by the NK cells comprises (i) an NKG2D ligand-binding domain, (ii) a CD8 transmembrane domain, and (iii) a signaling complex that comprises an OX40 co-stimulatory subdomain and a CD3z co-stimulatory subdomain. In several embodiments, the population of immune cells is contacted with a vector comprising a polynucleotide encoding a cytotoxic receptor, wherein the cytotoxic receptor targets one or more of NKG2D, CD19, CD70, BCMA, CD38, GPRC5D, CD138 DLL3, EGFR, PSMA, FLT3, ALPPL2, CLDN4, CLDN6, or KREMEN2 expressed by target tumor cells.

[0084] In several embodiments, the methods further include contacting a population of immune cells with a vector comprising a polynucleotide encoding a cytotoxic receptor comprising an extracellular ligand binding domain, a transmembrane domain, and a cytotoxic signaling complex, wherein the cytotoxic signaling complex comprises an OX40 subdomain and/or a 4-1 BB domain, and a CD3zeta subdomain.

[0085] In several embodiments, the methods further include contacting a population of immune cells with a vector comprising a polynucleotide, wherein the polynucleotide bicistronically encodes membrane bound IL15. In several embodiments, the vector is a retroviral vector.

[0086] In several embodiments, the methods further include contacting a population of immune cells, wherein the immune cells comprise Natural Killer (NK) cells, T cells, induced pluripotent stem cells (iPSCs), iPSC-derived NK cells, NK-92 cells, or combinations thereof.

[0087] Also provided for herein is a method of treating cancer in a subject comprising administering to the subject a population of genetically engineered and/or genetically edited immune cells.

[0088] In several embodiments, the immune cells express a cytotoxic receptor comprising an extracellular ligand binding domain, a transmembrane domain, and a cytotoxic signaling complex. In some embodiments, the cytotoxic signaling complex comprises an OX-40 subdomain, and a CD3zeta subdomain. In some embodiments, the method further includes where cells are engineered to express membrane bound IL-15.

[0089] In some embodiments, the immune cells are genetically edited. In some embodiments, the immune cells are genetically edited at one or more target sites in the genome of the immune cell to yield reduced levels of expression of the protein which is encoded by a gene which comprises an edited target site as compared to a non-edited immune cell. In some embodiments, the edits are made using a Crispr/CasX, Crispr/CasY, or Crispr/Cas9 system, or a combination thereof. In some embodiments, the genetically engineered and edited immune cells exhibit one or more of enhanced expansion capability, enhanced cytotoxicity against target cells, and enhanced persistence, as compared to immune cells without or not comprising genetically edited target sites.

[0090] Some embodiments relate to a method wherein immune cells are edited at a gene encoding one or more of CISH, ADAR2A, SMAD3, MAPKAPK3, CEACAM1, DDIT4, TGFBR2, NKG2A, SOCS2, CBLB, B2M, TIGIT, PD-1, TIM-3, CD38, and TCR alpha.

[0091] In several embodiments, the cytotoxic receptor expressed by the immune cells comprises (i) an NKG2D ligand-binding domain, (ii) a CD8 transmembrane domain, and (iii) a signaling complex that comprises an OX40 co-stimulatory subdomain and a CD3z co-stimulatory subdomain. In several embodiments, the cytotoxic receptor expressed by immune cells comprises (i) a binding domain that binds to one or more epitopes of CD19, CD70, BCMA, CD38, GPRC5D, CD138 DLL3, EGFR, PSMA, FLT3, ALPPL2, CLDN4, CLDN6, or KREMEN2 expressed by target tumor cells, (ii) a CD8 transmembrane domain, and (iii) a signaling complex that comprises an OX40 co-stimulatory subdomain and a CD3z co-stimulatory subdomain.

[0092] In several embodiments, provided is a method of treating cancer in a subject comprising administering to the subject a population of genetically engineered immune cells, wherein the immune cells comprise Natural Killer (NK) cells, T cells, induced pluripotent stem cells (iPSCs), iPSC-derived NK cells, NK-92 cells, or combinations thereof. In several embodiments, the population of genetically engineered immune cells comprise a mixture of NK cells and T cells, or a mixture of iPSC-derived NK cells and T cells.

[0093] In several embodiments, the method further provides that the NK cells and/or the iPSC-derived NK cells are edited at least to reduce CISH expression, and/or the T cells target CD19 or NKG2D. In several embodiments, method includes administering immune cells wherein the immune cells are allogeneic with respect to the subject. In several embodiments, the method includes further administering IL2.

[0094] As disclosed herein, host immune responses against administered cells (e.g., allogeneic engineered cells) can limit the efficacy and persistence of the administered cells. In some embodiments, as disclosed herein, a mixed population of immune cells are used for immunotherapy. In such cases, not only does the host immune response present a challenge, but so does the potential for the administered cells to act on one another in a manner that suppresses the efficacy of the immunotherapy, as well as against the host tissues (e.g., off target effects). In several embodiments, a mixed cell immunotherapy approach therefore requires additional engineering and/or gene editing in order to reduce graft versus host effects, host versus graft rejection, and maintenance of compatibility between the mixed immune cell types in the therapeutic. In an allogeneic immunotherapy context, an engineered T cell expressing a CAR can cause graft versus host rejection because the T cell recognizes host cells as non-self cells. This recognition occurs through the graft T cell receptor interacting with host cell HLA. Thus, in several embodiments, gene editing to disrupt the T cell receptor can eliminate T cell-based graft versus host rejection. In the inverse condition, host versus graft rejection, the host T cells recognize the graft immune cells (e.g., NK cell and/or T cells) as non-self and destroy the administered cells, thus reducing the persistence and efficacy of the immunotherapy. As editing the T cell receptor out of host cells is not practical, gene editing of the immune cells to be administered can be performed, as described herein. In several embodiments, gene editing to reduce/eliminate HLA expression on the engineered immune cells allows them to avoid being identified as non-self by host cells. Beta-2 microglobulin (B2M) gene editing/knockout is used to accomplish this, according to several embodiments disclosed herein. However, if B2M knockout is complete, this renders the edited cells susceptible to NK cell cytotoxicity, not only from host NK cells, but from NK cells within the administered immune cells (host versus graft and fratricide). This is because editing to remove B2M expression causes loss of all HLA molecules, including the normally expressed signals that would function to inhibit NK cell activity (KIR molecules). Thus, as disclosed in more detail below, in several embodiments, additional modifications are made to mask an allogeneic mixed immune cell product from both the host immune system and from fratricide from other immune cells in the mixed immune cell product. In several embodiments, various proteins can be expressed on the surface of the allogeneic immune cells that inhibits their being target by NK cells (both host and allogeneic cells). For example “don't eat me” signals that ordinarily allow cells to avoid being phagocytosed by macrophages can be expressed on allogeneic CAR-expressing NK and/or T cells to decrease targeting by NK cells. Other approaches that provide multiple benefits are also disclosed herein, for example reducing NK cell-mediated suppression while also enhancing the persistence of engineered NK cells. As discussed in more detail below, in several embodiments, immune cells (e.g., CAR expressing T cells) are engineered to express HLA-E, which gives these cells the ability to interact with inhibitory NKG2A receptor present on NK cells (host or engineered allogeneic). This interaction induces a temporary inhibition of NK cell activity, whether host or engineered allogeneic NK cells. Regarding the host NK cells, this suppression reduces the host NK cell activity against the T cells and allows the T cells to act against target tumor cells. The temporary suppression of the engineered allogeneic NK cells helps prevent NK cell exhaustion, as the engineered allogeneic NK cells has a period of reduced cytotoxic activity (e.g., a rest period). When the temporary suppression eases the engineered allogeneic NK cells return to exerting cytotoxic effects on target tumor cells. Thus, in several embodiments, the suppressive effects actually serve to enhance the persistence of the allogeneic NK cells in a mixed immune cell population for immunotherapy. In additional embodiments, peptides or proteins derived from viruses can be expressed by the engineered allogeneic cells to temporarily exert suppressive activity on NK cells (both host and those engineered NK cells within the mixed population) and thus increase the overall persistence of the allogeneic mixed immune cell population. In some embodiments, the combined acute activity of the engineered NK cells (even with the periods of suppression) and longer duration activity of the engineered T cells results in cytotoxic lysis of tumor cells. Resulting tumor debris is processed by host immune cells (e.g., dendritic cells) and tumor antigens are thus presented to T cells, thereby recruiting host immune cells to fight the tumor. In several embodiments, engineered cells are designed to undergo a temporary suppression (e.g., a period of reduced cytotoxic activity or a rest period). This suppression can be a reduction of cytotoxic or other activity by at least 10-90% (e.g., 10-30%, 30-50%, 50-70%, 70-90% and overlapping ranges therein). In one embodiment, over 90% suppression is achieved. Temporary can include, for example, minutes, hours, or days. Cells may be permanently suppressed in one embodiment.

[0095] There is provided for herein, in several embodiments, a population of genetically engineered immune cells for cancer immunotherapy, comprising genetically engineered immune cells that express a cytotoxic receptor comprising an extracellular ligand binding domain, a transmembrane domain, and a cytotoxic signaling complex, wherein the genetically engineered immune cells are engineered to express at least one immunosuppressive effector, wherein the at least one immunosuppressive effector exerts suppressive effects on the cytotoxic activity of natural killer cells and/or T cells, wherein the genetically engineered immune cells exhibit one or more of enhanced expansion capability, enhanced cytotoxicity against target cells, and enhanced persistence, as compared to cells that do not comprise said immunosuppressive effector.

[0096] Also provided for herein is a population of genetically engineered immune cells for cancer immunotherapy, comprising one or more of genetically engineered NK cells and genetically engineered T cells, wherein the genetically engineered immune cells are engineered to express a cytotoxic receptor, wherein the genetically engineered immune cells are genetically engineered to express at least one immunosuppressive effector, wherein the at least one immunosuppressive effector exerts suppressive effects on the cytotoxic activity of undesired cells, wherein the undesired cells comprise one or more of non-engineered natural killer cells, non-engineered T cells, or undesired engineered cells, and wherein the genetically engineered immune cells exhibit one or more of enhanced expansion capability, enhanced cytotoxicity against target cells, and enhanced persistence, as compared to cells that do not comprise said immunosuppressive effector.

[0097] Additionally, provided for herein, in several embodiments, is a population of genetically engineered immune cells for cancer immunotherapy, comprising one or more of genetically engineered NK cells and genetically engineered T cells, wherein the plurality of genetically engineered immune cells are engineered to express a cytotoxic receptor, wherein the genetically engineered immune cells are genetically engineered to express at least one immunosuppressive effector, wherein the at least one immunosuppressive effector exerts suppressive effects on undesired cytotoxic activity of suppressive cells, wherein the genetically engineered immune cells exhibit one or more of enhanced expansion capability, enhanced cytotoxicity against target cells, and enhanced persistence, as compared to cells that do not comprise said immunosuppressive effector.

[0098] There is also provided for herein, in several embodiments, a population of genetically engineered immune cells, comprising one or more of genetically engineered NK cells and genetically engineered T cells, wherein the plurality of genetically engineered immune cells are engineered to express a cytotoxic receptor comprising an extracellular ligand binding domain, a transmembrane domain, and a cytotoxic signaling complex, wherein the genetically engineered immune cells are genetically engineered to express at least one immunosuppressive effector, wherein the at least one immunosuppressive effector exerts suppressive effects on undesired cytotoxic activity of suppressive cells, and wherein, optionally, the genetically engineered immune cells are further engineered to express one or more of the following: IL-15, mblL-15, at least one viral immunosuppressive peptide integrated within an extracellular region, or extracellular regions, of the cytotoxic receptor, at least one viral immunosuppressive peptide expressed on a cell membrane of the genetically engineered immune cells, at least one portion of a human immunosuppressive protein or protein complex integrated within an extracellular region, or extracellular regions, of the cytotoxic receptor, at least one portion of a human immunosuppressive protein or protein complex expressed on a cell membrane of the genetically engineered immune cells, and/or at least one chimeric viral-human immunosuppressive construct expressed on a cell membrane of the genetically engineered immune cells and/or integrated at one or more extracellular regions of the cytotoxic receptor.

[0099] In several embodiments, the suppressive cells comprise host cells (e.g., NK cells and/or T cells). In several embodiments, the suppressive cells comprise one or more of non-engineered natural killer cells, non-engineered T cells, or suppressive engineered cells. In several embodiments, the suppressive engineered cells comprise the genetically engineered immune cells (e.g. those to be administered to a patient for cancer immunotherapy. In several embodiments, the cells that do not comprise said immunosuppressive effector are either non-engineered or engineered cells. In several embodiments, the immunosuppressive effector exerts transient immunosuppressive effects. In several embodiments, the transient immunosuppressive effects are beneficial for reducing the potential exhaustion of one or more of the genetically engineered immune cells. In several embodiments, the immunosuppressive effector (or effectors) are not engineered to be expressed in a matched manner across the various cell types within the genetically engineered immune cells. For example, in several embodiments, a T cell may be engineered to express a certain immunosuppressive effector (or effectors) while an NK cells is not so engineered and expresses a different profile of immunosuppressive effector (or effectors).

[0100] In several embodiments, the cytotoxic receptor comprises an extracellular ligand binding domain, a transmembrane domain, and a cytotoxic signaling complex. In several embodiments, the cytotoxic receptor targets one or more of NKG2D, CD19, and CD70 expressed by target tumor cells. In several embodiments, the cytotoxic signaling complex comprises an OX40 subdomain or a 4-1 BB domain, and a CD3zeta subdomain, or any combination thereof (including replicates of one or more subdomains).

[0101] In addition, in several embodiments, at least a portion of the genetically engineered immune cells are engineered to express membrane bound IL 5. In several embodiments, a portion of the cells are not engineered to express membrane-bound IL15. In several embodiments, NK cells are engineered to express mbIL15, while T cells are not. In several embodiments, both NK and T cells are engineered to express mbIL15. In several embodiments, T cells, not NK cells are engineered to express mbIL15, but NK cells are not. In several embodiments, NK cells and/or T cells are engineered to express soluble IL15, in addition to, or in place of mbIL15. In several embodiments, the mbIL15 is encoded by the nucleic acid sequence of SEQ ID NO: 489, or a sequence having at least 80%, 85%, 90%, 95%, 96%, 97%, 98%, or 99% sequence identity to SEQ ID NO: 489. In several embodiments, the mbIL15 has the amino acid sequence of SEQ ID NO: 490, or a sequence having at least 80%, 85%, 90%, 95%, 96%, 97%, 98%, or 99% sequence identity to SEQ ID NO: 490.

[0102] In several embodiments, the genetically engineered immune cells are also genetically edited to reduce expression of beta-2 microglobulin (B2M). In several embodiments, the reduced expression of B2M enables the immune cells to be used in allogeneic cancer immunotherapy with reduced host versus graft rejection as compared to immune cells expressing endogenous levels of B2M.

[0103] In several embodiments, the at least one immunosuppressive effector comprises a virally-derived peptide. In some embodiments, the at least one immunosuppressive effector comprises a peptide derived from a retrovirus. In several embodiments, the at least one immunosuppressive effector comprises a peptide derived from an envelope protein of a retrovirus. In several embodiments, the at least one immunosuppressive effector comprises at least a portion of a human protein and/or at least a portion of a human protein complex. In some embodiments, the at least one immunosuppressive effector comprises at least a portion of human protein. In several embodiments, the at least one immunosuppressive effector comprises a chimeric construct comprises at least one virally-derived peptide and at least a portion of a human protein and/or at least a portion of a human protein complex. In several embodiments, the chimeric immunosuppressive effector construct comprises two or more of a truncated human CD47, a p15E peptide, an HIV peptide, and an HTLV peptide. In several embodiments, the chimeric immunosuppressive effector construct comprises a truncated human CD47 domain and at least one of p15E peptide, an HIV peptide, and an HTLV peptide. In several embodiments, the chimeric immunosuppressive effector construct comprises a truncated human CD47 domain and at least one HIV peptide. In several embodiments, the chimeric immunosuppressive effector construct comprises a truncated human CD47 domain and at least HTLV peptide. In several embodiments, the chimeric immunosuppressive effector construct comprises a viral UL18 protein. In several embodiments, the chimeric immunosuppressive construct comprises a human B2M domain.

[0104] In several embodiments, the at least one immunosuppressive effector is integrated into the cytotoxic receptor. In several embodiments, the at least one immunosuppressive effector is integrated into the cytotoxic receptor between the transmembrane domain and the extracellular ligand-binding domain. In several embodiments, the at least one immunosuppressive effector is integrated into the cytotoxic receptor within the extracellular ligand-binding domain. In several embodiments, the extracellular ligand-binding domain comprises an scFv and the at least one immunosuppressive effector is integrated into a linker region of the scFv. In several embodiments, the at least one immunosuppressive effector is integrated into the cytotoxic receptor within an N-terminal region of the cytotoxic receptor distally positioned from the extracellular ligand-binding domain. Depending on the embodiment, an immunosuppressive effector is integrated into the cytotoxic receptor at a plurality of locations within an extracellular region of the cytotoxic receptor. In several embodiments, the immunosuppressive effector in a first location is different from the immunosuppressive effector at a different location(s). In some embodiments, the same immunosuppressive effector is integrated at multiple locations. In several embodiments, different immunosuppressive effectors are integrated at various locations.

[0105] In several embodiments, the at least one immunosuppressive effector is bound to an extracellular membrane of the immune cells. In several embodiments, the at least one immunosuppressive effector comprises a transmembrane protein. In several embodiments, the transmembrane protein is selected from CD8α, CD4, CD3ε, CD3γ, CD3δ, CD3ζ, CD28, CD137, glycophorin A, glycophorin D, nicotinic acetylcholine receptor, a GABA receptor, FcεRIγ, and a T-cell receptor. In several embodiments, the transmembrane protein comprises a CD8α transmembrane protein.

[0106] In several embodiments, the genetically engineered immune cells include a cytotoxic receptor comprising at least one immunosuppressive effector and at least one membrane-bound immunosuppressive effector.

[0107] In several embodiments, whether membrane bound or integrated into the CAR, a spacer sequence (also referred to as a hinge) is used to separate the immunosuppressive effector, or the CAR, from the transmembrane domain. In several embodiments, the spacer is selected from a CD8α, IgG1, IgG2, IgG3, IgG4, or CD28 spacer or is derived from CD8α, IgG1, IgG2, IgG3, IgG4, CD28, or can be a fully synthetic sequence. In several embodiments, the hinge region comprises one or more of SEQ ID NOs: 479-487. In several embodiments, the hinge region comprises an amino acid sequence with at least about 80%, at least about 85%, at least about 90%, at least about 94%, at least about 95%, at least about 96%, at least about 97%, at least about 98%, or at least about 99%, sequence identity, homology and/or functional equivalence with any of SEQ ID NOs: 479-486.

[0108] In several embodiments, the immunosuppressive effector comprises one or more peptides having at least about 80%, at least about 85%, at least about 90%, at least about 94%, or at least about 95% sequence identity to one or more of SEQ ID NOs: 199-215. In several embodiments, the immunosuppressive effector comprises a peptide having at least about 80%, at least about 85%, at least about 90%, at least about 94%, or at least about 95% sequence identity to SEQ ID NO: 199. In several embodiments, the immunosuppressive effector comprises an amino acid having at least about 80%, at least about 85%, at least about 90%, at least about 94%, or at least about 95% sequence identity to SEQ ID NO: 219. In several embodiments, the immunosuppressive effector comprises a peptide having at least about 80%, at least about 85%, at least about 90%, at least about 94%, or at least about 95% sequence identity to one or more of SEQ ID NO: 220, 225, 230, 235, and 250. In several embodiments, the immunosuppressive effector comprises an amino acid having at least about 80%, at least about 85%, at least about 90%, at least about 94%, or at least about 95% sequence identity to one or more of SEQ ID NO: 223, 228, 233, 238, and 253. In several embodiments, the immunosuppressive effector comprises a peptide having at least about 80%, at least about 85%, at least about 90%, at least about 94%, or at least about 95% sequence identity to SEQ ID NO: 240. In several embodiments, the immunosuppressive effector comprises an amino acid having at least about 80%, at least about 85%, at least about 90%, at least about 94%, or at least about 95% sequence identity to SEQ ID NO: 243.

[0109] In several embodiments, the immunosuppressive effector comprises a peptide having at least about 80%, at least about 85%, at least about 90%, at least about 94%, or at least about 95% sequence identity to one or more of SEQ ID NO: 245, 273, 276, 278, 279, 286, 287, 288, and 289. In several embodiments, the immunosuppressive effector comprises an amino acid having at least about 80%, at least about 85%, at least about 90%, at least about 94%, or at least about 95% sequence identity to SEQ ID NO: 248.

[0110] In several embodiments, the immunosuppressive effector comprises a chimeric immunosuppressive effector construct that is membrane bound and comprises a sequence having at least about 80%, at least about 85%, at least about 90%, at least about 94%, or at least about 95% sequence identity to one or more of SEQ ID Nos: 256, 259, 262, 265, 268, and 271.

[0111] In several embodiments, the chimeric immunosuppressive effector construct comprises a viral UL18 protein and comprises a sequence having at least about 80%, at least about 85%, at least about 90%, at least about 94%, or at least about 95% sequence identity to SEQ ID NO: 280. In several embodiments, the chimeric immunosuppressive effector construct comprises a viral UL18 protein and a human B2M domain and comprises a sequence having at least about 80%, at least about 85%, at least about 90%, at least about 94%, or at least about 95% sequence identity to SEQ ID NO: 283 or 285.

[0112] In several embodiments, the genetically engineered immune cells comprise genetically engineered Natural Killer (NK) cells, genetically engineered T cells, or combinations thereof. Other immune cells may be included as well, in some embodiments. In several embodiments, the genetically engineered immune cells are suitable for use in allogeneic cancer cell therapy with reduced risk of graft versus host disease. Advantageously, in several embodiments, the genetically engineered immune cells are suitable for use in allogeneic cancer cell therapy with reduced risk of cytotoxic activity between the genetically engineered immune cells.

[0113] Also provided for herein is a method for the treatment of cancer in a subject comprising administering to the subject genetically engineered immune cells according to embodiments of the present disclosure. Also provided is the use of genetically engineered immune cells according to embodiments of the present disclosure for the treatment of cancer as well their use in the preparation of a medicament for the treatment of cancer.

[0114] Additionally, in several embodiments, there is provided a method of manufacturing a population of genetically engineered immune cells for cancer immunotherapy, comprising contacting a population of immune cells with a polynucleotide encoding a cytotoxic receptor, and contacting the population of immune cells with an additional polynucleotide encoding at least one immunosuppressive effector. In several embodiments, there is provided a method of engineering a population of genetically engineered immune cells for cancer immunotherapy, comprising contacting a population of immune cells with a polynucleotide encoding a cytotoxic receptor and encoding at least one immunosuppressive effector. In several embodiments, the at least one immunosuppressive effector exerts suppressive effects on the cytotoxic activity of suppressive cells and in several embodiments, the genetically engineered immune cells exhibit one or more of enhanced expansion capability, enhanced cytotoxicity against target cells, and enhanced persistence, as compared to cells that do not comprise said at least one immunosuppressive effector. In several embodiments, the method further comprises genetically editing the DNA of the genetically engineered immune cells to alter the expression of one or more of a CISH gene, a B2M gene, a CD70 gene, an adenosine receptor gene, an NKG2A gene, a CIITA gene, a TGFBR gene, or any combination thereof. In several embodiments, the polynucleotide optionally further encodes membrane-bound IL15. In several embodiments, the method further comprises contacting the population of immune cells with a polynucleotide encoding a membrane-bound immunosuppressive effector.

[0115] Also provided for herein are methods of reducing fratricide among a mixed population of genetically engineered immune cells for cancer immunotherapy, comprising contacting a first subpopulation of immune cells from a population of mixed immune cells with a polynucleotide encoding at least one immunosuppressive effector, and contacting the second subpopulation from a population of mixed immune cells with a polynucleotide encoding at least an additional immunosuppressive effector, wherein the expression of the immunosuppressive effector by the first subpopulation and the second subpopulation reduces fratricide among the population of genetically engineered immune cells.

[0116] In several embodiments, the expression of the at least one immunosuppressive effector by the first subpopulation of immune cells reduces, at least temporarily, suppressive activity of a second subpopulation of immune cells that are directed against the first subpopulation of immune cells and expression of the at least an additional immunosuppressive effector by the second subpopulation of immune cells reduces, at least temporarily, suppressive activity of the first subpopulation of immune cells that are directed against the second subpopulation of immune cells. In several embodiments, the method further comprises contacting the population of immune cells with a polynucleotide encoding a cytotoxic receptor comprising an extracellular ligand binding domain, a transmembrane domain, and a cytotoxic signaling complex. In several embodiments, the method optionally further comprises genetically editing the DNA of the genetically engineered immune cells to alter the expression of one or more of a CISH gene, a B2M gene, a CD70 gene, an adenosine receptor gene, an NKG2A gene, a CIITA gene, a TGFBR gene, or any combination thereof.

[0117] In several embodiments, there is provided a method of engineering a population of genetically engineered immune cells for enhanced allogeneic cancer immunotherapy, comprising genetically editing a mixed population of immune cells comprising NK cells and T cells to reduce expression Human Leukocyte Antigen (HLA) on the surface of the immune cells and genetically engineering the edited cells to express one or more immunosuppressive effectors that reduce NK-mediated cytotoxicity against the mixed population of immune cells. In several embodiments, the reduced expression of HLA on the surface of the immune cells reduces T cell-mediated cytotoxicity against the edited population of immune cells. In several embodiments, the reduced expression of HLA on the surface of the cells renders the edited population of immune cells susceptible to NK-mediated cytotoxicity against the edited immune cells. In several embodiments, the one or more immunosuppressive effectors comprises one or more of a viral immunosuppressive peptide, a viral protein that is an HLA homolog, HLA-E, HLA-G, a human protein or fragment thereof that reduces phagocytosis of cells, a chimeric construct comprising a viral immunosuppressive peptide and a human protein or fragment thereof that reduces phagocytosis of cells, or combinations thereof. In several embodiments, the reduced T cell-mediated cytotoxicity reduces, at least temporarily, engineered T cell-mediated fratricidal cytotoxicity against engineered NK cells and, upon administration, host T-cell mediated cytotoxicity against engineered NK cells. In several embodiments, the reduced NK cell-mediated cytotoxicity reduces, at least temporarily, engineered NK cell-mediated fratricidal cytotoxicity against engineered T cells and, upon administration, host NK cell-mediated cytotoxicity against engineered NK and engineered T cells, thereby allowing for enhanced persistence of the engineering mixed population of immune cells upon administration to an allogeneic subject and allowing for enhanced allogeneic cancer immunotherapy.

[0118] In several embodiments, the method further comprises contacting the mixed population of immune cells with a polynucleotide encoding a cytotoxic receptor comprising an extracellular ligand binding domain, a transmembrane domain, and a cytotoxic signaling complex. In several embodiments, the polynucleotide encodes a cytotoxic receptor targeting one or more of NKG2D, CD19, and CD70 expressed by target tumor cells. In several embodiments, the cytotoxic signaling complex comprises an OX40 subdomain or a 4-1BB domain, and a CD3zeta subdomain, or any combination thereof. In several embodiments, the method further comprising genetically editing the DNA of the genetically engineered immune cells to alter the expression of one or more of a CISH gene, a B2M gene, a CD70 gene, an adenosine receptor gene, an NKG2A gene, a CIITA gene, a TGFBR gene, or any combination thereof. In several embodiments, the gene editing to reduce expression or the gene editing to induce expression is made using a CRISPR-Cas system. In several embodiments, the CRISPR-Cas system comprises a Cas selected from Cas9, Csn2, Cas4, Cpf1, C2c1, C2c3, Cas13a, Cas13b, Cas13c, CasX, CasY and combinations thereof. In several embodiments, the Cas is Cas9.

[0119] In several embodiments, cells for immunotherapy are genetically modified to enhance one or more characteristics of the cells that results in a more effective therapeutic. In several embodiments, one or more of the expansion potential, cytotoxicity and/or persistence of the genetically modified immune cells is enhanced. In several embodiments, the immune cells are also engineered to express a cytotoxic receptor that targets a tumor. There is provided for herein, in several embodiments, a population of genetically engineered natural killer (NK) cell for cancer immunotherapy, comprising a plurality of NK cells, wherein the plurality of NK cells are engineered to express a cytotoxic receptor comprising an extracellular ligand binding domain, a transmembrane domain, and a cytotoxic signaling complex, wherein the NK cells are genetically edited to express reduced levels of a cytokine-inducible SH2-containing (CIS) protein encoded by a CISH gene as compared to a non-engineered NK cell, wherein the reduced CIS expression was engineered through editing of a CISH gene, and wherein the genetically engineered NK cells exhibit one or more of enhanced expansion capability, enhanced cytotoxicity against target cells, and enhanced persistence, as compared to NK cells expressing native levels of CIS. In several embodiments, the cytotoxic signaling complex comprises an OX-40 subdomain and a CD3zeta subdomain. In several embodiments, the NK cells are engineered to express membrane bound IL-15. In several embodiments, T cells are engineered and used in place of, or in addition to NK cells. In several embodiments, NKT cells are not included in the engineered immune cell population. In several embodiments, the population of immune cells comprises, consists of, or consists essentially of engineered NK cells.

[0120] In several embodiments, the extracellular ligand binding domain comprises a receptor that is directed against a tumor marker selected from the group consisting of MICA, MICB, ULBP1, ULBP2, ULBP3, ULBP4, ULBP5, and ULBP6. In several embodiments, the cytotoxic receptor expressed by the NK cells comprises, consists of, or consists essentially of (i) an NKG2D ligand-binding domain, (ii) a CD8 transmembrane domain, and (iii) a signaling complex that comprises an OX40 co-stimulatory subdomain and a CD3z co-stimulatory subdomain. In several embodiments, the cytotoxic receptor is encoded by a polynucleotide having at least 80%, 85%, 90%, 95%, 96%, 97%, 98%, or 99% sequence identity to SEQ ID NO: 145. In several embodiments, the cytotoxic receptor has at least 80%, 85%, 90%, 95%, 96%, 97%, 98%, or 99% sequence identity to SEQ ID NO: 174 or 899.

[0121] In several embodiments, the cytotoxic receptor expressed by the NK cells comprises a chimeric antigen receptor (CAR) that comprises, consists of, or consists essentially of (i) an tumor binding domain that comprises an anti-CD19 antibody fragment, (ii) a CD8 transmembrane domain, and (iii) a signaling complex that comprises an OX40 co-stimulatory subdomain and a CD3z co-stimulatory subdomain. In several embodiments, the anti-CD19 antibody comprises a variable heavy (VH) domain of a single chain Fragment variable (scFv) and a variable light (VL) domain of a scFv, wherein the VH domain comprises the amino acid sequence of SEQ ID NO: 120, and wherein the encoded VL domain comprises the amino acid sequence of SEQ ID NO: 118. In several embodiments, the CAR expressed by the T cells has at least 95% sequence identity to the amino acid sequence set forth in SEQ ID NO: 178 or 901. In several embodiments, the anti-CD19 antibody fragment is designed (e.g., engineered) to reduce potential antigenicity of the encoded protein and/or enhance one or more characteristics of the encoded protein (e.g., target recognition and/or binding characteristics) Thus, according to several embodiments, the anti-CD19 antibody fragment does not comprise certain sequences. For example, according to several embodiments the anti-CD19 antibody fragment is not encoded by SEQ ID NO: 116, nor does it comprise the VL regions of SEQ ID NO: 105 or 107, or the VH regions of SEQ ID NO: 104 or 106. In several embodiments, the anti-CD19 antibody fragment does not comprise one or more CDRs selected from SEQ ID NO: 108 to 115.

[0122] In several embodiments, the expression of CIS is substantially reduced as compared to a non-engineered NK cell. According to certain embodiments provided for herein, gene editing can reduce expression of a target protein, like CIS (or others disclosed herein) by about 30%, about 40%, about 50%, about 60%, about 70%, about 75%, about 80%, about 85%, about 90%, about 95%, about 97%, about 98%, about 99%, or more (including any amount between those listed). In several embodiments, the gene is completely knocked out, such that expression of the target protein is undetectable. Thus, in several embodiments, immune cells (e.g., NK cells) do not express a detectable level of CIS protein.

[0123] In several embodiments, the NK cells are further genetically engineered to express a reduced level of a transforming growth factor beta receptor (TGFBR) as compared to a non-engineered NK cell. In several embodiments, at least 50% of the population of NK cells do not express a detectable level of the TGFBR. In several embodiments, the NK cells are further genetically edited to express a reduced level of beta-2 microglobulin (B2M) as compared to a non-engineered NK cell. In several embodiments, at least 50% of the population of NK cells do not express a detectable level of B2M surface protein. In several embodiments, the NK cells are further genetically edited to express a reduced level of CIITA (class II major histocompatibility complex transactivator) as compared to a non-engineered NK cell. In several embodiments, at least 50% of the population of NK cells do not express a detectable level of CIITA. In several embodiments, the NK cells are further genetically edited to express a reduced level of a Natural Killer Group 2, member A (NKG2A) receptor as compared to a non-engineered NK cell. In several embodiments, at least 50% of the population of NK cells do not express a detectable level of NKG2A. In several embodiments, the NK cells are further genetically edited to express a reduced level of a Cbl proto-oncogene B protein encoded by a CBLB gene as compared to a non-engineered NK cell. In several embodiments, at least 50% of the population of NK cells do not express a detectable level of Cbl proto-oncogene B protein. In several embodiments, the NK cells are further genetically edited to express a reduced level of a tripartite motif-containing protein 29 protein encoded by a TRIM29 gene as compared to a non-engineered NK cell. In several embodiments, at least 50% of the population of NK cells do not express a detectable level of TRIM29 protein. In several embodiments, the NK cells are further genetically edited to express a reduced level of a suppressor of cytokine signaling 2 protein encoded by a SOCS2 gene as compared to a non-engineered NK cell. In several embodiments, at least 50% of the population of NK cells do not express a detectable level of SOCS2 protein. Depending on the embodiment, any combination of the above-referenced target proteins/genes can be edited to a desired level, including in combination with CIS, including such that the proteins are not expressed at a detectable level. In several embodiments, there may remain some amount of protein that is detectable, but the function of the protein is disrupted, substantially disrupted, eliminated or substantially eliminated. In several embodiments, even if some functionality remains, the positive effects imparted to the engineered immune cell (e.g., NK cell or T cell) remain and serve to enhance one or more anti-cancer aspects of the cells.

[0124] In several embodiments, the NK cells are further genetically edited to disrupt expression of at least one immune checkpoint protein by the NK cells. In several embodiments, the at least one immune checkpoint protein is selected from CTLA4, PD-1, lymphocyte activation gene (LAG-3), NKG2A receptor, KIR2DL-1, KIR2DL-2, KIR2DL-3, KIR2DS-1 and/or KIR2DA-2, and combinations thereof.

[0125] In several embodiments, gene editing is used to “knock in” or otherwise enhance expression of a target protein. In several embodiments, expression of a target protein can be enhanced by about 30%, about 40%, about 50%, about 60%, about 70%, about 75%, about 80%, about 85%, about 90%, about 95%, about 97%, about 98%, about 99%, or more (including any amount between those listed). For example in several embodiments, the NK cells are further genetically edited to express CD47. In several embodiments, the NK cells are further genetically engineered to express HLA-E. Any genes that are knocked in can be knocked in in combination with any of the genes that are knocked out or otherwise disrupted.

[0126] In several embodiments, the population of genetically engineered NK cells further comprises a population of genetically engineered T cells. In several embodiments, the population of T cells is at least partially, if not substantially, non-alloreactive. In several embodiments, the non-alloreactive T cells comprise at least one genetically edited subunit of a T Cell Receptor (TCR) such that the non-alloreactive T cells do not exhibit alloreactive effects against cells of a recipient subject. In several embodiments, the population of T cells is engineered to express a chimeric antigen receptor (CAR) directed against a tumor marker, wherein the tumor marker is one or more of CD19, CD123, CD70, Her2, mesothelin, Claudin 6, BCMA, PD-L1, EGFR. Combinations of two or more of these tumor markers can be targeted, in some embodiments. In several embodiments, the CAR expressed by the T cells is directed against CD19. In several embodiments, the CAR expressed by the T cells has at least 80%, 85%, 90%, 95%, 96%, 97%, 98%, or 99% sequence identity to the amino acid sequence set forth in SEQ ID NO: 178 or 901. In several embodiments, the CAR targets CD19. In several embodiments, the CAR is designed (e.g., engineered) to reduce potential antigenicity of the encoded protein and/or enhance one or more characteristics of the encoded protein (e.g., target recognition and/or binding characteristics) Thus, according to several embodiments, anti-CD19 CAR does not comprise certain sequences. For example, according to several embodiments the anti-CD19 CAR does not comprise by SEQ ID NO: 116, SEQ ID NO: 105, 107, 104 or 106. In several embodiments, the anti-CD19 antibody fragment does not comprise one or more CDRs selected from SEQ ID NO: 108 to 115.

[0127] In several embodiments, the TCR subunit of the T cells modified is TCRα. In several embodiments, the modification to the TCR of the T cells results in at least 80%, 85%, or 90% of the population of T cells not expressing a detectable level of the TCR. As with the edited NK cells disclosed herein, in several embodiments, the T cells are further genetically edited to reduce expression of one or more of CIS, TGFBR, B2M, CIITA, TRIM29 and SOCS2 as compared to non-engineered T cells, or to express CD47 or HLA-E. In several embodiments, the T cells are further genetically edited to disrupt expression of at least one immune checkpoint protein by the T cells, wherein the at least one immune checkpoint protein is selected from CTLA4, PD-1, and lymphocyte activation gene (LAG-3).

[0128] Depending on the embodiment, the gene editing of the NK cells and/or the T cells in order to reduce expression and/or the gene editing to induce expression is made using a CRISPR-Cas system. In several embodiments, the CRISPR-Cas system comprises a Cas selected from Cas9, Csn2, Cas4, Cpf1, C2c1, C2c3, Cas13a, Cas13b, Cas13c, and combinations thereof. In several embodiments, the Cas is Cas9. In several embodiments, the CRISPR-Cas system comprises a Cas selected from Cas3, Cas8a, Cas5, Cas8b, Cas8c, Cas10d, Cse1, Cse2, Csy1, Csy2, Csy3, GSU0054, Cas10, Csm2, Cmr5, Cas10, Csx11, Csx10, Csf1, and combinations thereof. In several embodiments, the gene editing of the NK cells and/or the T cells in order to reduce expression and/or the gene editing to induce expression is made using a zinc finger nuclease (ZFN). In several embodiments, the gene editing of the NK cells and/or the T cells in order to reduce expression and/or the gene editing to induce expression is made using a Transcription activator-like effector nuclease (TALEN).

[0129] In several embodiments, the genetically engineered NK cells and/or engineered T cells have an OX40 subdomain encoded by a sequence having at least 80%, 85%, 90%, or 95% sequence identity to SEQ ID NO. 5. In several embodiments, the genetically engineered NK cells and/or genetically engineered T cells have a CD3 zeta subdomain encoded by a sequence having at least 80%, 85%, 90%, or 95% sequence identity to SEQ ID NO. 7. In several embodiments, the genetically engineered NK cells and/or genetically engineered T cells have an mbIL15 encoded by a sequence having at least 80%, 85%, 90%, or 95% sequence identity to SEQ ID NO. 11 or 489.

[0130] Also provided for herein are methods of treating cancer in a subject, comprising administering to the subject a population of genetically engineered NK cells (and/or a population of genetically engineered T cells) as disclosed herein. Provided for herein is also a use of the population of genetically engineered NK cells (and/or a population of genetically engineered T cells) as disclosed herein in the treatment of cancer. Provided for herein is also a use of the population of genetically engineered NK cells (and/or a population of genetically engineered T cells) as disclosed herein in the manufacture of a medicament for the treatment of cancer.

[0131] Methods of treating cancer are also provided for herein. In several embodiments, there is provided a method for treating cancer in a subject comprising administering to the subject a population of genetically engineered immune cells, comprising (i) a plurality of NK cells, wherein the plurality of NK cells are engineered to express a cytotoxic receptor comprising an extracellular ligand binding domain, a transmembrane domain, and a cytotoxic signaling complex, wherein the NK cells are genetically edited to express reduced levels of cytokine-inducible SH2-containing (CIS) protein encoded by a CISH gene by the cells as compared to a non-engineered NK cell, wherein the reduced CIS expression was engineered through genetic editing of a CISH gene, and wherein the genetically engineered NK cells exhibit one or more of enhanced expansion capability, enhanced cytotoxicity against target cells, and enhanced persistence, as compared to NK cells expressing native levels of CIS; and optionally (ii) a plurality of T cells.

[0132] In several embodiments, the cytotoxic signaling complex comprises an OX-40 subdomain and a CD3zeta subdomain. In several embodiments, the NK cells are also engineered to express membrane bound IL-15.

[0133] In several embodiments, when included, the plurality of T cells are substantially non-alloreactive. Advantageously, in several embodiments, the non-alloreactive T cells comprise at least one modification to a subunit of a T Cell Receptor (TCR) such that the non-alloreactive T cells do not exhibit alloreactive effects against cells of a recipient subject. In several embodiments, the T cells are also engineered to express a chimeric antigen receptor (CAR) directed against a tumor marker, which can be selected from CD19, CD123, CD70, Her2, mesothelin, Claudin 6, BCMA, PD-L1, EGFR, and combinations thereof.

[0134] In several embodiments, the cytotoxic receptor expressed by the NK cells comprises (i) an NKG2D ligand-binding domain, (ii) a CD8 transmembrane domain, and (iii) a signaling complex that comprises an OX40 co-stimulatory subdomain and a CD3z co-stimulatory subdomain. In several embodiments, the cytotoxic receptor is encoded by a polynucleotide having at least 80%, 85%, 90%, or 95% sequence identity to SEQ ID NO: 145. In several embodiments, the cytotoxic receptor has at least 80%, 85%, 90%, or 95% sequence identity to SEQ ID NO: 174 or 899. In several embodiments, the cytotoxic receptor expressed by the NK cells is directed against CD19. In several embodiments, the cytotoxic receptor expressed by the NK cells has at least 80%, 85%, 90%, or 95% sequence identity to the amino acid sequence set forth in SEQ ID NO: 178 or 901. In several embodiments, the CAR expressed by the T cells is directed against CD19. In several embodiments, the CAR expressed by the T cells (and or the NK cells) comprises (i) an tumor binding domain that comprises an anti-CD19 antibody fragment, (ii) a CD8 transmembrane domain, and (iii) a signaling complex that comprises an OX40 co-stimulatory subdomain and a CD3z co-stimulatory subdomain. In several embodiments, the polynucleotide encoding the CAR also encodes for membrane bound IL15. In several embodiments, the anti-CD19 antibody fragment comprises a variable heavy (VH) domain of a single chain Fragment variable (scFv) and a variable light (VL) domain of a scFv. In several embodiments, the VH domain comprises the amino acid sequence of SEQ ID NO: 120 and wherein the VL domain comprises the amino acid sequence of SEQ ID NO: 118.

[0135] In several embodiments, the NK cells and/or the T cells are further genetically edited to reduce expression of one or more of CIS, TGFBR, B2M, CIITA, TRIM29 and SOCS2 as compared to a non-engineered T cells, or to express CD47 or HLA-E.

[0136] In several embodiments, the NK cells and/or the T cells are further genetically edited to disrupt expression of at least one immune checkpoint protein by the cells, wherein the at least one immune checkpoint protein is selected from CTLA4, PD-1, and lymphocyte activation gene (LAG-3), NKG2A receptor, KIR2DL-1, KIR2DL-2, KIR2DL-3, KIR2DS-1 and/or KIR2DA-2.

[0137] In several embodiments, the OX40 subdomain is encoded by a sequence having at least 80%, 85%, 90%, or 95% sequence identity to SEQ ID NO. 5. In several embodiments, the CD3 zeta subdomain is encoded by a sequence having at least 80%, 85%, 90%, or 95% sequence identity to SEQ ID NO. 7. In several embodiments, mbIL15 is encoded by a sequence having at least 80%, 85%, 90%, or 95% sequence identity to SEQ ID NO. 11.

[0138] Depending on the embodiment of the methods disclosed herein that are applied, the gene editing of the NK cells and/or the T cells in order to reduce expression and/or the gene editing to induce expression is made using a CRISPR-Cas system. In several embodiments, the CRISPR-Cas system comprises a Cas selected from Cas9, Csn2, Cas4, Cpf1, C2c1, C2c3, Cas13a, Cas13b, Cas13c, and combinations thereof. In several embodiments, the Cas is Cas9. In several embodiments, the CRISPR-Cas system comprises a Cas selected from Cas3, Cas8a, Cas5, Cas8b, Cas8c, Cas10d, Cse1, Cse2, Csy1, Csy2, Csy3, GSU0054, Cas10, Csm2, Cmr5, Cas10, Csx11, Csx10, Csf1, and combinations thereof. In several embodiments, the gene editing of the NK cells and/or the T cells in order to reduce expression and/or the gene editing to induce expression is made using a zinc finger nuclease (ZFN). In several embodiments, the gene editing of the NK cells and/or the T cells in order to reduce expression and/or the gene editing to induce expression is made using a Transcription activator-like effector nuclease (TALEN).

[0139] Additionally provided for herein is a mixed population of engineered immune cells for cancer immunotherapy, comprising a plurality of NK cells, wherein the plurality of NK cells are engineered to express a cytotoxic receptor comprising an extracellular ligand binding domain, a transmembrane domain, and a cytotoxic signaling complex, wherein the NK cells are genetically edited to express reduced levels of cytokine-inducible SH2-containing (CIS) protein encoded by a CISH gene by the cells as compared to a non-engineered NK cell, wherein the reduced CIS expression was engineered through genetic editing of a CISH gene, and wherein the genetically engineered NK cells exhibit one or more of enhanced expansion capability, enhanced cytotoxicity against target cells, and enhanced persistence, as compared to NK cells expressing native levels of CIS, and a plurality of T cells that are substantially non-alloreactive through at least one modification to a subunit of a T Cell Receptor (TCR), wherein the population of T cells is engineered to express a chimeric antigen receptor (CAR) directed against a tumor marker selected from one or more of CD19, CD123, CD70, Her2, mesothelin, Claudin 6, BCMA, PD-L1, and EGFR. In several embodiments, the cytotoxic signaling complex of the cytotoxic receptor and/or CAR comprises an OX-40 subdomain and a CD3zeta subdomain. In several embodiments, the NK cells and/or the T cells are engineered to express membrane bound IL-15. In several embodiments, the cytotoxic receptor expressed by the NK cells has at least 80%, 85%, 90%, or 95% sequence identity to SEQ ID NO: 174 or 899. In several embodiments, the cytotoxic receptor expressed by the NK cells has at least 80%, 85%, 90%, or 95% sequence identity to the amino acid sequence set forth in SEQ ID NO: 178 or 901. In several embodiments, the CAR expressed by the T cells has at least 80%, 85%, 90%, or 95% sequence identity to the amino acid sequence set forth in SEQ ID NO: 178 or 901.

[0140] Provided for herein, in several embodiments, is a population of genetically altered immune cells for cancer immunotherapy, comprising a population of immune cells that are genetically modified to reduce the expression of a cytokine-inducible SH2-containing protein encoded by a CISH gene by the immune cell, genetically modified to reduce the expression of a transforming growth factor beta receptor by the immune cell, genetically modified to reduce the expression of a Natural Killer Group 2, member A (NKG2A) receptor by the immune cell, genetically modified to reduce the expression of a Cbl proto-oncogene B protein encoded by a CBLB gene by the immune cell, genetically modified to reduce the expression of a tripartite motif-containing protein 29 protein encoded by a TRIM29 gene by the immune cell, and/or genetically modified to reduce the expression of a suppressor of cytokine signaling 2 protein encoded by a SOCS2 gene by the immune cell, and genetically engineered to express a chimeric antigen receptor (CAR) directed against a tumor marker present on a target tumor cell. In several embodiments, the population comprises, consists of, or consists essentially of Natural Killer cells. In several embodiments, the population further comprises T cells. In several embodiments, the CAR is directed against CD19. In several embodiments, the CAR comprises one or more humanized CDR sequences. In several embodiments, the CAR is directed against an NKG2D ligand. In several embodiments, the genetic modification to the cells is made using a CRISPR-Cas system. In several embodiments, the CRISPR-Cas system comprises a Cas selected from Cas9, Csn2, Cas4, Cpf1, C2c1, C2c3, Cas13a, Cas13b, Cas13c, and combinations thereof. In several embodiments, the Cas is Cas9. In several embodiments, the modification is to CISH and the CRISPR-Cas system is guided by one or more guide RNAs selected from those comprising a sequence of SEQ ID NO. 153, 154, 155, 156, or 157; the modification is to the TGFBR2 and the CRISPR-Cas system is guided by one or more guide RNAs selected from those comprising a sequence of SEQ ID NO. 147, 148, 149, 150, 151, or 152; the modification is to NKG2A and the CRISPR-Cas system is guided by one or more guide RNAs selected from those comprising a sequence of SEQ ID NO. 158, 159, or 160; the modification is to CBLB and the CRISPR-Cas system is guided by one or more guide RNAs selected from those comprising a sequence of SEQ ID NO. 164, 165, or 166; the modification is to TRIM29 and the CRISPR-Cas system is guided by one or more guide RNAs selected from those comprising a sequence of SEQ ID NO. 167, 168, or 169, and/or the modification is to SOCS2 and the CRISPR-Cas system is guided by one or more guide RNAs selected from those comprising a sequence of SEQ ID NO. 171, 172, or 173.

[0141] In several embodiments, the genetic modification(s) is made using a zinc finger nuclease (ZFN). In several embodiments, the genetic modification(s) is made using a Transcription activator-like effector nuclease (TALEN).

[0142] In several embodiments, the genetically altered immune cells exhibit increased cytotoxicity, increased viability and/or increased anti-tumor cytokine release profiles as compared to unmodified immune cells. In several embodiments, the genetically altered immune cells have been further genetically modified to reduce alloreactivity against the cells when administered to a subject that was not the donor of the cells.

[0143] Also provided for herein is a mixed population of immune cells for cancer immunotherapy, comprising a population of T cells that are substantially non-alloreactive through at least one modification to a subunit of a T Cell Receptor (TCR) selected from TCRα, TCRβ, TCRγ, and TCRδ such that the TCR does not recognize major histocompatibility complex differences between the T cells of a recipient subject to which the mixed population of immune cells was administered, wherein the population of T cells is engineered to express a chimeric antigen receptor (CAR) directed against a tumor marker, wherein the tumor marker is selected from the group consisting of CD19, CD123, CD70, Her2, mesothelin, Claudin 6, BCMA, PD-L1, EGFR, and combinations thereof; and a population of natural killer (NK) cells, wherein the population of NK cells is engineered to express a chimeric receptor comprising an extracellular ligand binding domain, a transmembrane domain, a cytotoxic signaling complex and wherein the extracellular ligand binding domain a that is directed against a tumor marker selected from the group consisting of MICA, MICB, ULBP1, ULBP2, ULBP3, ULBP4, ULBP5, and ULBP6. In several embodiments, the TCR subunit modified is TCRα.

[0144] In several embodiments, the T cells and/or the NK cells are modified such that they express reduced levels of MHC I and/or MHC II molecules and thereby induce reduced immune response from a recipient subject's immune system to which the NK cells and T cells are allogeneic. In several embodiments, the MHC I and/or MHC II molecule is beta-microglobulin and/or CIITA (class II major histocompatibility complex transactivator). In several embodiments, the T cells and/or the NK cells further comprise a modification that disrupts expression of at least one immune checkpoint protein by the T cells and/or the NK cells. Depending on the embodiment the at least one immune checkpoint protein is selected from CTLA4, PD-1, lymphocyte activation gene (LAG-3), NKG2A receptor, KIR2DL-1, KIR2DL-2, KIR2DL-3, KIR2DS-1 and/or KIR2DA-2, and combinations thereof.

[0145] In several embodiments, the NK cells and/or T cells are further modified to reduce or substantially eliminate expression and/or function of CIS. In several embodiments, the NK cells are further engineered to express membrane bound IL-15.

[0146] In several embodiments, the CAR expressed by the T cells comprises (i) an tumor binding domain that comprises an anti-CD19 antibody fragment, (ii) a CD8 transmembrane domain, and (iii) a signaling complex that comprises an OX40 co-stimulatory subdomain and a CD3z co-stimulatory subdomain. In several embodiments, the T cells also express membrane bound IL15. In several embodiments, mbIL15 is encoded by the same polynucleotide encoding the CAR. In several embodiments, the anti-CD19 antibody comprises a variable heavy (VH) domain of a single chain Fragment variable (scFv) and a variable light (VL) domain of a scFv. In some such embodiments, the VH domain comprises, consists of, or consists essentially of the amino acid sequence of SEQ ID NO: 120. In several embodiments, the encoded VL domain comprises, consists of, or consists essentially of the amino acid sequence of SEQ ID NO: 118. In several embodiments, the OX40 subdomain is encoded by a sequence having at least 80%, 85%, 90%, or 95% sequence identity to SEQ ID NO. 5. In several embodiments, the CD3 zeta subdomain is encoded by a sequence having at least 80%, 85%, 90%, or 95% sequence identity to SEQ ID NO. 7. In several embodiments, mbIL15 is encoded by a sequence having at least 80%, 85%, 90%, or 95% sequence identity to SEQ ID NO. 11. In several embodiments, the CAR expressed by the T cells has at least 80%, 85%, 90%, or 95% sequence identity to the amino acid sequence set forth in SEQ ID NO: 178 or 901. In several embodiments, chimeric receptor expressed by the NK cells comprises (i) an NKG2D ligand-binding domain, (ii) a CD8 transmembrane domain, and (iii) a signaling complex that comprises an OX40 co-stimulatory subdomain and a CD3z co-stimulatory subdomain. In several embodiments, the NK cells are further engineered to express membrane bound IL15 (which is optionally encoded by the same polynucleotide encoding the chimeric receptor). In several embodiments, the chimeric receptor is encoded by a polynucleotide having at least 80%, 85%, 90%, or 95% sequence identity to SEQ ID NO: 145. In several embodiments, the chimeric receptor has at least 80%, 85%, 90%, or 95% sequence identity to SEQ ID NO: 174 or 899.

[0147] In several embodiments, the modification to the TCR results in at least 80% of the population of T cells not expressing a detectable level of the TCR, but at least 70% of the population of T cells express a detectable level of the CAR. In several embodiments, the T cells and/or NK cells are further modified to reduce expression of one or more of a B2M surface protein, a cytokine-inducible SH2-containing protein (CIS) encoded by a CISH gene, a transforming growth factor beta receptor, a Natural Killer Group 2, member A (NKG2A) receptor, a Cbl proto-oncogene B protein encoded by a CBLB gene, a tripartite motif-containing protein 29 protein encoded by a TRIM29 gene, a suppressor of cytokine signaling 2 protein encoded by a SOCS2 gene by the T cells and/or NK cells. In several embodiments, gene editing can reduce expression of any of these target proteins by about 30%, about 40%, about 50%, about 60%, about 70%, about 75%, about 80%, about 85%, about 90%, about 95%, about 97%, about 98%, about 99%, or more (including any amount between those listed). In several embodiments, the gene is completely knocked out, such that expression of the target protein is undetectable. In several embodiments, target protein expression can be enhanced by about 30%, about 40%, about 50%, about 60%, about 70%, about 75%, about 80%, about 85%, about 90%, about 95%, about 97%, about 98%, about 99%, or more (including any amount between those listed). For example in several embodiments, the T cells and/or NK cells are further genetically edited to express CD47. In several embodiments, the NK cells are further genetically engineered to express HLA-E. Any genes that are knocked in can be knocked in in combination with any of the genes that are knocked out or otherwise disrupted.

[0148] In several embodiments, the modification(s) to the TCR, or the further modification of the NK cells or T cells is made using a CRISPR-Cas system. In several embodiments, the CRISPR-Cas system comprises a Cas selected from Cas9, Csn2, Cas4, Cpf1, C2c1, C2c3, Cas13a, Cas13b, Cas13c, and combinations thereof. In several embodiments, the Cas is Cas9. In several embodiments, the CRISPR-Cas system comprises a Cas selected from Cas3, Cas8a, Cas5, Cas8b, Cas8c, Cas10d, Cse1, Cse2, Csy1, Csy2, Csy3, GSU0054, Cas10, Csm2, Cmr5, Cas10, Csx11, Csx10, Csf1, and combinations thereof.

[0149] In several embodiments, the modification(s) to the TCR, or the further modification of the NK cells or T cells is made using a zinc finger nuclease (ZFN). In several embodiments, the modification(s) to the TCR, or the further modification of the NK cells or T cells is made using a Transcription activator-like effector nuclease (TALEN).

[0150] Also provided for herein is a mixed population of immune cells for cancer immunotherapy, comprising a population of T cells that are substantially non-alloreactive due to at least one modification to a subunit of a T Cell Receptor (TCR) such that the non-alloreactive T cells do not exhibit alloreactive effects against cells of a recipient subject, wherein the population of T cells is engineered to express a chimeric antigen receptor (CAR) directed against a tumor marker selected from CD19, CD123, CD70, Her2, mesothelin, Claudin 6, BCMA, PD-L1, EGFR, and combinations thereof, and a population of natural killer (NK) cells, wherein the population of NK cells is engineered to express a chimeric receptor comprising an extracellular ligand binding domain, a transmembrane domain, a cytotoxic signaling complex and wherein the extracellular ligand binding domain a that is directed against a tumor marker selected from the group consisting of MICA, MICB, ULBP1, ULBP2, ULBP3, ULBP4, ULBP5, and ULBP6.

[0151] Also provided herein are methods of treating cancer in a subject without inducing graft versus host disease, comprising administering to the subject the mixed population of immune cells according to the present disclosure. Provided for herein are uses of the mixed population of immune cells according to the present disclosure in the treatment of cancer. Provided for herein are uses of the mixed population of immune cells according to the present disclosure in the manufacture of a medicament for the treatment of cancer.

[0152] In several embodiments, there is provided a method for treating cancer in a subject comprising administering to the subject at least a first dose of a mixed population of immune cells, wherein the mixed population of cells comprises a population of substantially non-alloreactive T cells engineered to express a chimeric antigen receptor (CAR) directed against a tumor marker selected from CD19, CD123, CD70, Her2, mesothelin, Claudin 6, BCMA, PD-L1, EGFR, and combinations thereof and a population of natural killer (NK) cells engineered to express a chimeric receptor comprising an extracellular ligand binding domain, a transmembrane domain, a cytotoxic signaling complex and wherein the extracellular ligand binding domain a that is directed against a tumor marker selected from the group consisting of MICA, MICB, ULBP1, ULBP2, ULBP3, ULBP4, ULBP5, and ULBP6.

[0153] In several embodiments, the non-alloreactive T cells comprise at least one modification to a subunit of a T Cell Receptor (TCR) such that the non-alloreactive T cells do not exhibit alloreactive effects against cells of a recipient subject. In several embodiments, the CAR expressed by the T cells is directed against CD19. In several embodiments, the CAR expressed by the T cells comprises (i) an tumor binding domain that comprises an anti-CD19 antibody fragment, (ii) a CD8 transmembrane domain, and (iii) a signaling complex that comprises an OX40 co-stimulatory subdomain and a CD3z co-stimulatory subdomain. In several embodiments, the polynucleotide encoding the CAR also encodes membrane bound IL115. In several embodiments, the anti-CD19 antibody comprises a variable heavy (VH) domain of a single chain Fragment variable (scFv) and a variable light (VL) domain of a scFv. In several embodiments, the VH domain comprises, consists of, or consists essentially of the amino acid sequence of SEQ ID NO: 120 and wherein the VL domain comprises, consists of, or consists essentially of the amino acid sequence of SEQ ID NO: 118. In several embodiments, the CAR expressed by the T cells has at least 80%, 85%, 90%, or 95% sequence identity to the amino acid sequence set forth in SEQ ID NO: 178 or 901. In several embodiments, the chimeric receptor expressed by the NK cells comprises (i) an NKG2D ligand-binding domain, (ii) a CD8 transmembrane domain, and (iii) a signaling complex that comprises an OX40 co-stimulatory subdomain and a CD3z co-stimulatory subdomain. In several embodiments, the polynucleotide encoding the chimeric receptor also encodes membrane bound IL15. In several embodiments, the chimeric receptor is encoded by a polynucleotide having at least 80%, 85%, 90%, or 95% sequence identity to SEQ ID NO: 145. In several embodiments, the chimeric receptor has at least 95%80%, 85%, 90%, or 95% sequence identity to SEQ ID NO: 174 or 899. In several embodiments, the OX40 subdomain of the CAR and/or chimeric receptor is encoded by a sequence having at least 80%, 85%, 90%, or 95% sequence identity to SEQ ID NO. 5. In several embodiments, the CD3 zeta subdomain of the CAR and/or chimeric receptor is encoded by a sequence having at least 80%, 85%, 90%, or 95% sequence identity to SEQ ID NO. 7. In several embodiments, the mbIL15 expressed by the T cells and/or the NK cells is encoded by a sequence having at least 80%, 85%, 90%, or 95% sequence identity to SEQ ID NO. 11.

[0154] In several embodiments, the cytotoxic receptor expressed by immune cells targets CD19 and has at least 80%, 85%, 90%, or 95% sequence identity to the nucleic acid sequence set forth in SEQ ID NO: 179, 181, 183, 185, 187, 189, 191, 193, 195, and/or 197. In several embodiments, the CAR expressed by the immune cells targets CD19 and has at least 80%, 85%, 90%, or 95% sequence identity to the amino acid sequence set forth in SEQ ID NO: 180, 182, 184, 186, 188, 190, 192, 194, 196, 198, and/or any of 900-911.

[0155] In several embodiments, there is provided a mixed population of immune cells for cancer immunotherapy, wherein the mixed population comprises a population of T cells that express a CAR directed against a tumor antigen, the T cells having been genetically modified to be substantially non-alloreactive and a population of NK cells expressing a CAR directed against the same tumor antigen. In several embodiments, there is provided a mixed population of immune cells for cancer immunotherapy, wherein the mixed population comprises a population of T cells that express a CAR directed against a tumor antigen, the T cells having been genetically modified to be substantially non-alloreactive and a population of NK cells expressing a CAR directed against an additional tumor antigen. In several embodiments, there is provided a mixed population of immune cells for cancer immunotherapy, wherein the mixed population comprises a population of T cells that are substantially non-alloreactive and a population of NK cells expressing a chimeric receptor targeting a tumor ligand.

[0156] In several embodiments, the non-alloreactive T cells comprise at least one modification to a subunit of a T Cell Receptor (TCR) such that the TCR recognizes an antigen without recognition of major histocompatibility complex differences between the T cells of a subject to which the mixed population of immune cells was administered. In several embodiments, the population of non-alloreactive T cells is engineered to express a chimeric antigen receptor (CAR) directed against a tumor marker (e.g., a tumor associated antigen or a tumor antigen). Depending on the embodiment, the CAR can be engineered to target one or more of CD19, CD123, CD70, Her2, mesothelin, Claudin 6 (but not other Claudins), BCMA, PD-L1, EGFR.

[0157] In several embodiments, the population of NK cells is engineered to express a chimeric receptor comprising an extracellular ligand binding domain, a transmembrane domain, a cytotoxic signaling complex and wherein the extracellular ligand binding domain a that is directed against a tumor marker selected from the group consisting of MICA, MICB, ULBP1, ULBP2, ULBP3, ULBP4, ULBP5, and ULBP6. In several embodiments, the NK cells can also be engineered to express a CAR, the CAR can be engineered to target one or more of CD19, CD123, CD70, Her2, mesothelin, Claudin 6 (but not other Claudins), BCMA, PD-L1, EGFR (or any other antigen such that both T cells and NK cells are targeting the same antigen of interest).

[0158] In several embodiments, the T cells further comprise a mutation that disrupts expression of at least one immune checkpoint protein by the T cells. For example, the T cells may be mutated with respect to an immune checkpoint protein selected from CTLA4, PD-1 and combinations thereof. In several embodiments, blocking of B7-1/B7-2 to CTLA4 is also used to reduce T cells being maintained in an inactive state. Thus, in several embodiments, T cells are modified such that they express a mismatched or mutated CTLA4, while in some embodiments, an exogenous agent can be used to, for example, bind to and/or otherwise inhibit the ability of B7-1/B7-2 on antigen presenting cells to interact with CTLA4. Likewise, in several embodiments, NK cells can be modified to disrupt expression of at least one checkpoint inhibitor. In several embodiments, for example CDTLA4 or PD-1 are modified, e.g., mutated, in order to decrease the ability of such checkpoint inhibitors to reduce NK cell cytotoxic responses. In several embodiments, Lymphocyte activation gene 3 (LAG-3, CD223), is disrupted in NK cells (and/or T cells). In several embodiments, the inhibitory NKG2A receptor is mutated, knocked-out or inhibited, for example by an antibody. Monalizumab, by way of non-limiting example, is used in several embodiments to disrupt inhibitory signaling by the NKG2A receptor. In several embodiments, one or more of the killer inhibitory receptors (KIRs) on a NK cells is disrupted (e.g., through genetic modification) and/or blocked. For example, in several embodiments, one or more of KIR2DL-1, KIR2DL-2, KIR2DL-3, KIR2DS-1 and/or KIR2DA-2, are disrupted or blocked, thereby preventing their binding to HLA-C MHC I molecules. In addition, in several embodiments, TIM3 is modified, mutated (e.g., through gene editing) or otherwise functionally disrupted (e.g., blocked by an antibody) such that its normal function of suppressing the responses of immune cells upon ligand binding is disrupted. In several such embodiments, disruption of TIM3 expression or function (e.g., through CRISPr or other methods disclosed herein), optionally in combination with disruption of one or more immune checkpoint modulator, administered T cells and/or NK cells have enhanced anti-tumor activity. Tim-3 participates in galectin-9 secretion, the latter functioning to impair the anti-cancer activity of cytotoxic lymphoid cells including natural killer (NK) cells. TIM3 is also expressed in a soluble form, which prevents secretion of interleukin-2 (IL-2). Thus, in several embodiments, the disruption of TIM3, expression, secretion, or pathway functionality provides enhanced T cell and/or NK cell activity.

[0159] In several embodiments, TIGIT (also called VSTM3) is modified, mutated (e.g., through gene editing) or otherwise functionally disrupted (e.g., blocked by an antibody) such that its normal function of suppressing the responses of immune cells upon ligand binding is disrupted. CD155 is a ligand for TIGIT. In several embodiments, TIGIT expression is reduced or knocked out. In several embodiments, TIGIT is blocked by a non-activating ligand or its activity is reduced through a competitive inhibitor of CD155 (that inhibitor not activating TIGIT). TIGIT contains an inhibit ITIM motif, which in some embodiments is excised, for example, through gene editing with CRISPr, or other methods disclosed herein. In such embodiments, the function of TIGIT is reduced, which allows for enhanced T cell and/or NK cell activity.

[0160] In several embodiments, the adenosine receptor A1 is modified, mutated (e.g., through gene editing) or otherwise functionally disrupted (e.g., blocked by an antibody) such that its normal function of suppressing the responses of immune cells upon ligand binding is disrupted. Adenosine signaling is involved in tumor immunity, as a result of its function as an immunosuppressive metabolite. Thus, in several embodiments, the Adenosine Receptor A1 expression is reduced or knocked out. In several embodiments, the adenosine receptor A1 is blocked by a non-activating ligand or its activity is reduced through a competitive inhibitor of adenosine (that inhibitor not activating adenosine signaling pathways). In several embodiments, the adenosine receptor is modified, for example, through gene editing with CRISPr, or other methods disclosed herein to reduce its function or expression, which allows for enhanced T cell and/or NK cell activity.

[0161] In several embodiments, the TCR subunit modified is selected from TCRα, TCRβ, TCRγ, and TCRδ. In several embodiments, the TCR subunit modified is TCRα.

[0162] In several embodiments, the modification to the TCR is made using a CRISPR-Cas system. In several embodiments, the disruption of expression of at least one immune checkpoint protein by the T cells or NK cells is made using a CRISPR-Cas system. For example, a Cas can be selected from Cas9, Csn2, Cas4, Cpf1, C2c1, C2c3, Cas13a, Cas13b, Cas13c, and combinations thereof. In several embodiments, the Cas is Cas9. In several embodiments, the CRISPR-Cas system comprises a Cas selected from Cas3, Cas8a, Cas5, Cas8b, Cas8c, Cas10d, Cse1, Cse2, Csy1, Csy2, Csy3, GSU0054, Cas10, Csm2, Cmr5, Cas10, Csx11, Csx10, Csf1, and combinations thereof.

[0163] In several embodiments, the modification to the TCR is made using a zinc finger nuclease (ZFN). In several embodiments, the disruption of expression of the at least one immune checkpoint protein by the T cells or NK cells is made using a zinc finger nuclease (ZFN). In several embodiments, the modification to the TCR is made using a Transcription activator-like effector nuclease (TALEN). In several embodiments, the disruption of expression of the at least one immune checkpoint protein by the T cells or NK cells is made using a Transcription activator-like effector nuclease (TALEN). Combinations of ZFNs and TALENs (and optionally CRISPR-Cas) are used in several embodiments to modify either or both NK cells and T cells.

[0164] According to several embodiments, either the NK cells, the non-alloreactive T cells, or both, are further engineered to express membrane bound IL-15.

[0165] Advantageously, the mixed cell populations are useful in the methods provided for herein, wherein cancer in a subject can be treated without inducing graft versus host disease. In several embodiments, the methods comprise administering to the subject mixed population of non-alloreactive T cells expressing a CAR and engineered NK cells expressing a chimeric receptor. Also provided for are uses of a mixed population of non-alloreactive T cells expressing a CAR and engineered NK cells expressing a chimeric receptor in the treatment of cancer and/or in the manufacture of a medicament for the treatment of cancer. In still additional embodiments, the NK cells and T cells are allogeneic with respect to the subject receiving them. In several embodiments, such combinations involved NK cells and T cells directed against the same target antigen. For example, in several embodiments both the NK cells and T cells (e.g., non-alloreactive T cells) are allogeneic with respect to the subject receiving them and are engineered to express a CAR that targets the same antigen—for example CD19. In some embodiments, the NK cells and T cells are configured to both target cells expressing another marker, such as CD123, CD70, Her2, mesothelin, Claudin 6 (but not other Claudins), BCMA, PD-L1, EGFR (or any other antigen such that both T cells and NK cells are targeting the same antigen of interest).

[0166] In several embodiments, the modification to the TCR results in at least 75%, at least 80%, at least 85%, at least 90%, or at least 95% of the population of T cells that do not express a detectable level of the TCR, while at the same time at least 55%, at least 60%, at least 65%, at least 70%, or at least 75% of the population of T cells express a detectable level of the CAR. These cells are thus primarily non-alloreactive and armed with an anti-tumor-directed CAR. Further aiding in limiting immune reactions from the allogeneic T cells, in several embodiments, wherein at least 50% of the engineered T cells express a detectable level of the CAR and do not express a detectable level of TCR surface protein or B2M surface protein.

[0167] In several embodiments, NK cells are genetically modified to reduce the immune response that an allogeneic host might develop against non-self NK cells. In several embodiments, the NK cells are engineered such that they exhibit reduced expression of one or more MCH Class I and/or one or more MHC Class II molecule. In several embodiments, the expression of beta-microglobulin is substantially, significantly or completely reduced in at least a portion of NK cells that express (or will be modified to express) a CAR directed against a tumor antigen, such as CD19 (or any other antigen disclosed herein). In several embodiments, the expression of CIITA (class II major histocompatibility complex transactivator) is substantially, significantly or completely reduced in at least a portion of NK cells that express (or will be modified to express) a CAR directed against a tumor antigen, such as CD19 (or any other antigen disclosed herein). In several embodiments, such genetically modified NK cells are generated using CRISPr-Cas systems, TALENs, zinc fingers, RNAi, or other gene editing techniques. As discussed herein, in several embodiments, the NK cells with reduced allogenicity are used in combination with non-alloreactive T cells. In several embodiments, NK cells are modified to express CD47, which aids in the modified NK cell avoiding detection by endogenous innate immune cells of a recipient. In several embodiments, T cells are modified in a like fashion. In several embodiments, both NK cells and T cells are modified to express CD47, which aids in NK and/or T cell persistence in a recipient, thus enhancing anti-tumor effects. In several embodiments, NK cells are modified to express HLA-G, which aids in the modified NK cell avoiding detection by endogenous innate immune cells of a recipient. In several embodiments, T cells are modified in a like fashion. In several embodiments, both NK cells and T cells are modified to express HLA-G, which aids in NK and/or T cell persistence in a recipient, thus enhancing anti-tumor effects. In several embodiments, T cells and NK cells with reduced alloreactivity and engineered to express CARs against the same antigen are used to treat a cancer in an allogeneic patient.

[0168] In several embodiments, there is provided a population of genetically altered immune cells for cancer immunotherapy, comprising a population of immune cells that are genetically modified to reduce the expression of a transforming growth factor beta receptor by the immune cell, and genetically engineered to express a chimeric antigen receptor (CAR) directed against a tumor marker present on a target tumor cell. In additional embodiments, there is provided a population of genetically altered immune cells for cancer immunotherapy, comprising a population of immune cells that are genetically modified to reduce the expression of a Natural Killer Group 2, member A (NKG2A) receptor by the immune cell, and genetically engineered to express a chimeric antigen receptor (CAR) directed against a tumor marker present on a target tumor cell. In additional embodiments, there is provided a population of genetically altered immune cells for cancer immunotherapy, comprising a population of immune cells that are genetically modified to reduce the expression of a cytokine-inducible SH2-containing protein encoded by a CISH gene by the immune cell, and genetically engineered to express a chimeric antigen receptor (CAR) directed against a tumor marker present on a target tumor cell. CISH is an inhibitory checkpoint in NK cell-mediated cytotoxicity. In additional embodiments, there is provided a population of genetically altered immune cells for cancer immunotherapy, comprising a population of immune cells that are genetically modified to reduce the expression of a Cbl proto-oncogene B protein encoded by a CBLB gene by the immune cell, and genetically engineered to express a chimeric antigen receptor (CAR) directed against a tumor marker present on a target tumor cell. CBLB is an E3 ubiquitin ligase and a negative regulator of NK cell activation. In additional embodiments, there is provided a population of genetically altered immune cells for cancer immunotherapy, comprising a population of immune cells that are genetically modified to reduce the expression of a tripartite motif-containing protein 29 protein encoded by a TRIM29 gene by the immune cell, and genetically engineered to express a chimeric antigen receptor (CAR) directed against a tumor marker present on a target tumor cell. TRIM29 is an E3 ubiquitin ligase and a negative regulator of NK cell function after activation. In additional embodiments, there is provided a population of genetically altered immune cells for cancer immunotherapy, comprising a population of immune cells that are genetically modified to reduce the expression of a suppressor of cytokine signaling 2 protein encoded by a SOCS2 gene by the immune cell, and genetically engineered to express a chimeric antigen receptor (CAR) directed against a tumor marker present on a target tumor cell. SOCS2 is a negative regulator of NK cell function. In several embodiments the population of genetically altered immune cells comprises NK cells, T cells, or combinations thereof. In several embodiments, additional immune cell are also included, such as gamma delta T cells, NK T cells, and the like. In several embodiments, the CAR is directed against CD19. In some such embodiments, the CAR comprises one or more humanized CDR sequences. In additional embodiments, the CAR is directed against CD123. In several embodiments, the genetically modified cells are engineered to express more than one CAR that is directed to more than one target. Optionally, a mixed population of T cells and NK cells is used, in which the T cell and NK cells can each express at least one CAR, which may or may not be directed against the same cancer marker, depending on the embodiment. In several embodiments the cells express a CAR directed against an NKG2D ligand.

[0169] As discussed above, in several embodiments, the cells are edited using a CRISPr-based approach. In several embodiments, the modification is to TGFBR2 and the CRISPR-Cas system is guided by one or more guide RNAs selected from those comprising a sequence of SEQ ID NO. 147, 148, 149, 150 ,151, or 152 or a sequence that has at least 80%, 85%, 86%, 87%, 88%, 89%, 90%, 91%, 92%, 93%, 94%, 95%, 96%, 97%, 98%, or 99% homology to a sequence comprising a sequence of SEQ ID NO. 147, 148, 149, 150, 151, or 152. In several embodiments, the modification is to NKG2A and the CRISPR-Cas system is guided by one or more guide RNAs selected from those comprising a sequence of SEQ ID NO. 158, 159, or 160 or a sequence that has at least 80%, 85%, 86%, 87%, 88%, 89%, 90%, 91%, 92%, 93%, 94%, 95%, 96%, 97%, 98%, or 99% homology to a sequence comprising a sequence of SEQ ID NO. 158, 159, or 160. In several embodiments, the modification is to CISH and the CRISPR-Cas system is guided by one or more guide RNAs selected from those comprising a sequence of SEQ ID NO. 153, 154, 155, 156, or 157 or a sequence that has at least 80%, 85%, 86%, 87%, 88%, 89%, 90%, 91%, 92%, 93%, 94%, 95%, 96%, 97%, 98%, or 99% homology to a sequence comprising a sequence of SEQ ID NO. 153, 154, 155, 156, or 157. In several embodiments, the modification is to CBLB and the CRISPR-Cas system is guided by one or more guide RNAs selected from those comprising a sequence of SEQ ID NO. 164, 165 or 166 or a sequence that has at least 80%, 85%, 86%, 87%, 88%, 89%, 90%, 91%, 92%, 93%, 94%, 95%, 96%, 97%, 98%, or 99% homology to a sequence comprising a sequence of SEQ ID NO. 164, 165, or 166. In several embodiments, the modification is to TRIM29 and the CRISPR-Cas system is guided by one or more guide RNAs selected from those comprising a sequence of SEQ ID NO. 167, 168, or 169 or a sequence that has at least 80%, 85%, 86%, 87%, 88%, 89%, 90%, 91%, 92%, 93%, 94%, 95%, 96%, 97%, 98%, or 99% homology to a sequence comprising a sequence of SEQ ID NO. 167, 168, or 169. In several embodiments, the modification is to SOCS2 and the CRISPR-Cas system is guided by one or more guide RNAs selected from those comprising a sequence of SEQ ID NO. 171, 172, or 173 or a sequence that has at least 80%, 85%, 86%, 87%, 88%, 89%, 90%, 91%, 92%, 93%, 94%, 95%, 96%, 97%, 98%, or 99% homology to a sequence comprising a sequence of SEQ ID NO. 171, 172, or 173. In some embodiments, the guide RNA is 1, 2, 3, 4, 5, 6, 7, 8, 9, 10, 11, 12, 13,14, 15, 16, 17, 18, 19, 20, 21, 22, 23, 24, 25, 26, 27, 28, 29, 30, 31, 32, 33, 34, 35, 36, 37, 38, 39, 40, 41, 42, 43, 44, 45, 46, 47, 48, 49, 50, 51, 52, 53, 54, 55, 56, 57, 58, 59, 60, 61, 62, 63, 64, 65, 66, 67, 68, 69, 70, 71, 72, 73, 74, 75, 76, 77, 78, 79, 80, 81, 82, 83, 84, 85, 86, 87, 88, 89, 90, 91, 92, 93, 94, 95, 96, 97, 98, 99 or 100 nucleotides long.

[0170] In several embodiments, there is provided a method for producing an engineered T cell suitable for allogenic transplantation, the method comprising delivering to a T cell an RNA-guided nuclease, a gRNA targeting a T Cell Receptor gene, and a vector comprising a donor template that comprises a nucleic acid encoding a CAR, wherein the CAR comprises (i) a tumor binding domain that comprises an anti-CD19 antibody fragment, (ii) a CD8 transmembrane domain, and (iii) a signaling complex that comprises an OX40 co-stimulatory subdomain and a CD3z co-stimulatory subdomain, and (iv) membrane bound IL15, wherein the nucleic acid encoding the CAR is flanked by left and right homology arms to the T Cell Receptor gene locus; and (b) expanding the engineered T cells in culture.

[0171] Also provided is an additional method for an engineered T cell suitable for allogenic transplantation, the method comprising delivering to a T cell an RNA-guided nuclease, and a gRNA targeting a T Cell Receptor gene, in order to disrupt the expression of at least one subunit of the TCR, and delivering to the T cell a vector comprising a nucleic acid encoding a CAR, wherein the CAR comprises (i) a tumor binding domain that comprises an anti-CD19 antibody fragment, (ii) a CD8 transmembrane domain, and (iii) a signaling complex that comprises an OX40 co-stimulatory subdomain and a CD3z co-stimulatory subdomain, and (iv) membrane bound IL15 and expanding the engineered T cells in culture.

[0172] Further methods are also provided, for example a method for producing an engineered T cell suitable for allogenic transplantation, the method comprising delivering to a T cell a nuclease capable of inducing targeted double stranded DNA breaks at a target region of a T Cell Receptor gene, in order to disrupt the expression of at least one subunit of the TCR, delivering to the T cell a vector comprising a nucleic acid encoding a CAR, wherein the CAR comprises (i) a tumor binding domain that comprises an antibody fragment that recognizes one or more of CD19, CD123, CD70, Her2, mesothelin, Claudin 6, BCMA, PD-L1, and EGFR, (ii) a CD8 transmembrane domain, and (iii) a signaling complex that comprises an OX40 co-stimulatory subdomain and a CD3z co-stimulatory subdomain, and (iv) membrane bound IL15; and expanding the engineered T cells in culture. In several embodiments, the method further comprises modifying T-cells by inactivating at least a first gene encoding an immune checkpoint protein. In several embodiments, the immune checkpoint gene is selected from the group consisting of: PD1, CTLA-4, LAG3, Tim3, BTLA, BY55, TIGIT, B7H5, LAIR1, SIGLEC10, and 2B4.

[0173] Methods for treating cancers are provided, the methods comprising generating T cells suitable for allogeneic transplant according embodiments disclosed herein, wherein the T cells are from a donor, transducing a population of NK cells expanded from the same donor to express an activating chimeric receptor that comprises an extracellular ligand binding domain a that is directed against a tumor marker selected from the group consisting of MICA, MICB, ULBP1, ULBP2, ULBP3, ULBP4, ULBP5, and ULBP6 to generate an engineered NK cell population, optionally further expanding the T cells and/or the engineered NK cell population, combining the T cells suitable for allogeneic transplant with the engineered NK cell population, and administering the combined NK and T cell population to a subject allogeneic with respect to the donor.

[0174] Methods for treating cancers are provided, the methods comprising generating T cells suitable for allogeneic transplant according embodiments disclosed herein, wherein the T cells are from a donor and are modified to express a CAR directed against CD19, CD123, CD70, Her2, mesothelin, Claudin 6 (but not other Claudins), BCMA, PD-L1, or EGFR; transducing a population of NK cells expanded from the same donor to express a CAR directed against CD19, CD123, CD70, Her2, mesothelin, Claudin 6 (but not other Claudins), BCMA, PD-L1, or EGFR to generate an engineered NK cell population, optionally further expanding the T cells and/or the engineered NK cell population, combining the T cells suitable for allogeneic transplant with the engineered NK cell population, and administering the combined NK and T cell population to a subject allogeneic with respect to the donor.

[0175] There is also provided an additional method for treating a subject for cancer, the method comprising generating T cells suitable for allogeneic transplant according to embodiments disclosed herein, wherein the T cells are from a first donor, transducing a population of NK cells expanded from a second donor to express an activating chimeric receptor that comprises an extracellular ligand binding domain a that is directed against a tumor marker selected from the group consisting of MICA, MICB, ULBP1, ULBP2, ULBP3, ULBP4, ULBP5, and ULBP6 to generate an engineered NK cell population, optionally further expanding the T cells and/or the engineered NK cell population, combining the T cells suitable for allogeneic transplant with the engineered NK cell population, administering the combined NK and T cell population to a subject allogeneic with respect to the first and the second donor.

[0176] In several embodiments, there is provided herein an immune cell, and also populations of immune cells, that expresses a CD19-directed chimeric receptor, the chimeric receptor comprising an extracellular anti-CD19 binding moiety, a hinge and/or transmembrane domain, and an intracellular signaling domain. Also provided for herein are polynucleotides (as well as vectors for transfecting cells with the same) encoding a CD19-directed chimeric antigen receptor, the chimeric antigen receptor comprising an extracellular anti-CD19 binding moiety, a hinge and/or transmembrane domain, and an intracellular signaling domain.

[0177] Also provided for herein, in several embodiments, is a polynucleotide encoding a CD19-directed chimeric antigen receptor, the chimeric antigen receptor comprising an extracellular anti-CD19 binding moiety, wherein the anti-CD19 binding moiety comprises a scFv, a hinge, wherein the hinge is a CD8 alpha hinge, a transmembrane domain, and an intracellular signaling domain, wherein the intracellular signaling domain comprises a CD3 zeta ITAM.

[0178] Also provided for herein, in several embodiments, is a polynucleotide encoding a CD19-directed chimeric antigen receptor, the chimeric antigen receptor comprising an extracellular anti-CD19 binding moiety, wherein the anti-CD19 binding moiety comprises a variable heavy chain of a scFv or a variable light chain of a scFv, a hinge, wherein the hinge is a CD8 alpha hinge, a transmembrane domain, wherein the transmembrane domain comprises a CD8 alpha transmembrane domain, and an intracellular signaling domain, wherein the intracellular signaling domain comprises a CD3 zeta ITAM.

[0179] In several embodiments, the transmembrane domain comprises a CD8 alpha transmembrane domain. In several embodiments, the transmembrane domain comprises an NKG2D transmembrane domain. In several embodiments, the transmembrane domain comprises a CD28 transmembrane domain.

[0180] In several embodiments the intracellular signaling domain comprises or further comprises a CD28 signaling domain. In several embodiments, the intracellular signaling domain comprises or further comprises a 4-1 BB signaling domain. In several embodiments, the intracellular signaling domain comprises and/or further comprises OX40 domain. In several embodiments, the intracellular signaling domain comprises or further comprises a 4-1BB signaling domain. In several embodiments, the intracellular signaling domain comprises or further comprises a domain selected from ICOS, CD70, CD161, CD40L, CD44, and combinations thereof.

[0181] In several embodiments, the polynucleotide also encodes a truncated epidermal growth factor receptor (EGFRt). In several embodiments, the EGFRt is expressed in a cell as a soluble factor. In several embodiments, the EGFRt is expressed in a membrane bound form. In several embodiments, the polynucleotide also encodes membrane-bound interleukin-15 (mbIL15). Also provided for herein are engineered immune cells (e.g., NK or T cells, or mixtures thereof) that express a CD19-directed chimeric antigen receptor encoded by a polynucleotide disclosed herein. Further provided are methods for treating cancer in a subject comprising administering to a subject having cancer engineered immune cells expressing the chimeric antigen receptors disclosed herein. In several embodiments, there is provided the use of the polynucleotides disclosed herein in the treatment of cancer and/or in the manufacture of a medicament for the treatment of cancer.

[0182] In several embodiments, the anti-CD19 binding moiety comprises a heavy chain variable (VH) domain and a light chain variable (VL) domain. In several embodiments, the VH domain has at least 95% identity to the VH domain amino acid sequence set forth in SEQ ID NO: 33. In several embodiments, the VL domain has at least 95% identity to the VL domain amino acid sequence set forth in SEQ ID NO: 32. In several embodiments, the anti-CD19 binding moiety is derived from the VH and/or VL sequences of SEQ ID NO: 33 or 32. For example, in several embodiments, the VH and VL sequences for SEQ ID NO: 33 and/or 32 are subject to a humanization campaign and therefore are expressed more readily and/or less immunogenic when administered to human subjects. In several embodiments, the anti-CD19 binding moiety comprises a scFv that targets CD19 wherein the scFv comprises a heavy chain variable region comprising the sequence of SEQ ID NO. 35 or a sequence at least 95% identical to SEQ ID NO: 35. In several embodiments, the anti-CD19 binding moiety comprises an scFv that targets CD19 comprises a light chain variable region comprising the sequence of SEQ ID NO. 36 or a sequence at least 95% identical to SEQ ID NO: 36. In several embodiments, the anti-CD19 binding moiety comprises a light chain CDR comprising a first, second and third complementarity determining region (LC CDR1, LC CDR2, and LC CDR3, respectively) and/or a heavy chain CDR comprising a first, second and third complementarity determining region (HC CDR1, HC CDR2, and HC CDR3, respectively). Depending on the embodiment, various combinations of the LC CDRs and HC CDRs are used. For example, in one embodiment the anti-CD19 binding moiety comprises LC CDR1, LC CDR3, HC CD2, and HC, CDR3. Other combinations are used in some embodiments. In several embodiments, the LC CDR1 comprises the sequence of SEQ ID NO. 37 or a sequence at least about 95% homologous to the sequence of SEQ NO. 37. In several embodiments, the LC CDR2 comprises the sequence of SEQ ID NO. 38 or a or a sequence at least about 95% homologous to the sequence of SEQ NO. 38. In several embodiments, the LC CDR3 comprises the sequence of SEQ ID NO. 39 or a sequence at least about 95% homologous to the sequence of SEQ NO. 39. In several embodiments, the HC CDR1 comprises the sequence of SEQ ID NO. 40 or a sequence at least about 95% homologous to the sequence of SEQ NO. 40. In several embodiments, the HC CDR2 comprises the sequence of SEQ ID NO. 41, 42, or 43 or a sequence at least about 95% homologous to the sequence of SEQ NO. 41, 42, or 43. In several embodiments, the HC CDR3 comprises the sequence of SEQ ID NO. 44 or a sequence at least about 95% homologous to the sequence of SEQ NO. 44.

[0183] In several embodiments, there is also provided an anti-CD19 binding moiety that comprises a light chain variable region (VL) and a heavy chain variable region (HL), the VL region comprising a first, second and third complementarity determining region (VL CDR1, VL CDR2, and VL CDR3, respectively and the VH region comprising a first, second and third complementarity determining region (VH CDR1, VH CDR2, and VH CDR3, respectively. In several embodiments, the VL region comprises the sequence of SEQ ID NO. 45, 46, 47, or 48 or a sequence at least about 95% homologous to the sequence of SEQ NO. 45, 46, 47, or 48. In several embodiments, the VH region comprises the sequence of SEQ ID NO. 49, 50, 51 or 52 or a sequence at least about 95% homologous to the sequence of SEQ NO. 49, 50, 51 or 52.

[0184] In several embodiments, there is also provided an anti-CD19 binding moiety that comprises a light chain CDR comprising a first, second and third complementarity determining region (LC CDR1, LC CDR2, and LC CDR3, respectively. In several embodiments, the anti-CD19 binding moiety further comprises a heavy chain CDR comprising a first, second and third complementarity determining region (HC CDR1, HC CDR2, and HC CDR3, respectively. In several embodiments, the LC CDR1 comprises the sequence of SEQ ID NO. 53 or a sequence at least about 95% homologous to the sequence of SEQ NO. 53. In several embodiments, the LC CDR2 comprises the sequence of SEQ ID NO. 54 or a sequence at least about 95% homologous to the sequence of SEQ NO. 54. In several embodiments, the LC CDR3 comprises the sequence of SEQ ID NO. 55 or a sequence at least about 95% homologous to the sequence of SEQ NO. 55. In several embodiments, the HC CDR1 comprises the sequence of SEQ ID NO. 56 or a sequence at least about 95% homologous to the sequence of SEQ NO. 56. In several embodiments, the HC CDR2 comprises the sequence of SEQ ID NO. 57 or a sequence at least about 95% homologous to the sequence of SEQ NO. 57. In several embodiments, the HC CDR3 comprises the sequence of SEQ ID NO. 58 or a sequence at least about 95% homologous to the sequence of SEQ NO. 58.

[0185] In several embodiments, the intracellular signaling domain of the chimeric receptor comprises an OX40 subdomain. In several embodiments, the intracellular signaling domain further comprises a CD3zeta subdomain. In several embodiments, the OX40 subdomain comprises the amino acid sequence of SEQ ID NO: 6 (or a sequence at least about 95% homologous to the sequence of SEQ ID NO. 6) and the CD3zeta subdomain comprises the amino acid sequence of SEQ ID NO: 8 (or a sequence at least about 95% homologous to the sequence of SEQ ID NO: 8).

[0186] In several embodiments, the hinge domain comprises a CD8α hinge domain. In several embodiments, the CD8α hinge domain, comprises the amino acid sequence of SEQ ID NO: 2 or a sequence at least about 95% homologous to the sequence of SEQ ID NO: 2).

[0187] In several embodiments, the immune cell also expresses membrane-bound interleukin-15 (mbIL15). In several embodiments, the mbIL15 comprises the amino acid sequence of SEQ ID NO: 12 or a sequence at least about 95% homologous to the sequence of SEQ ID NO: 12.

[0188] In several embodiments, wherein the chimeric receptor further comprises an extracellular domain of an NKG2D receptor. In several embodiments, the immune cell expresses a second chimeric receptor comprising an extracellular domain of an NKG2D receptor, a transmembrane domain, a cytotoxic signaling complex and optionally, mbIL15. In several embodiments, the extracellular domain of the NKG2D receptor comprises a functional fragment of NKG2D comprising the amino acid sequence of SEQ ID NO: 26 or a sequence at least about 95% homologous to the sequence of SEQ ID NO: 26. In various embodiments, the immune cell engineered to express the chimeric antigen receptor and/or chimeric receptors disclosed herein is an NK cell. In some embodiments, T cells are used. In several embodiments, combinations of NK and T cells (and/or other immune cells) are used.

[0189] In several embodiments, there are provided herein methods of treating cancer in a subject comprising administering to the subject having an engineered immune cell targeting CD19 as disclosed herein. Also provided for herein is the use of an immune cell targeting CD19 as disclosed herein for the treatment of cancer. Likewise, there is provided for herein the use of an immune cell targeting CD19 as disclosed herein in the preparation of a medicament for the treatment of cancer. In several embodiments, the cancer treated is acute lymphocytic leukemia.

[0190] Some embodiments of the methods and compositions described herein relate to an immune cell. In some embodiments, the immune cell expresses a CD19-directed chimeric receptor comprising an extracellular anti-CD19 moiety, a hinge and/or transmembrane domain, and/or an intracellular signaling domain. In some embodiments, the immune cell is a natural killer (NK) cell. In some embodiments, the immune cell is a T cell.

[0191] In some embodiments, the hinge domain comprises a CD8α hinge domain. In some embodiments, the hinge domain comprises an Ig4 SH domain.

[0192] In some embodiments, the transmembrane domain comprises a CD8α transmembrane domain. In some embodiments, the transmembrane domain comprises a CD28 transmembrane domain. In some embodiments, the transmembrane domain comprises a CD3 transmembrane domain.

[0193] In some embodiments, the signaling domain comprises an OX40 signaling domain. In some embodiments, the signaling domain comprises a 4-1 BB signaling domain. In some embodiments, the signaling domain comprises a CD28 signaling domain. In some embodiments, the signaling domain comprises an NKp80 signaling domain. In some embodiments, the signaling domain comprises a CD16 IC signaling domain. In some embodiments, the signaling domain comprises a CD3zeta or CD3(ITAM signaling domain. In some embodiments, the signaling domain comprises an mblL-15 signaling domain. In some embodiments, the signaling domain comprises a 2A cleavage domain. In some embodiments, the mIL-15 signaling domain is separated from the rest or another portion of the CD19-directed chimeric receptor by a 2A cleavage domain.

[0194] Some embodiments relate to a method comprising administering an immune cell as described herein to a subject in need. In some embodiments, the subject has cancer. In some embodiments, the administration treats, inhibits, or prevents progression of the cancer.

### BRIEF DESCRIPTION OF THE DRAWINGS

[0195] FIG. 1 depicts non-limiting examples of tumor-directed chimeric antigen receptors.

[0196] FIG. 2 depicts additional non-limiting examples of tumor-directed chimeric antigen receptors.

[0197] FIG. 3 depicts additional non-limiting examples of tumor-directed chimeric antigen receptors.

[0198] FIG. 4 depicts additional non-limiting examples of tumor-directed chimeric antigen receptors.

[0199] FIG. 5 depicts additional non-limiting examples of tumor-directed chimeric antigen receptors.

[0200] FIG. 6 depicts non-limiting examples of tumor-directed chimeric antigen receptors directed against non-limiting examples of tumor markers.

[0201] FIG. 7 depicts additional non-limiting examples of tumor-directed chimeric antigen receptors directed against non-limiting examples of tumor markers.

[0202] FIGS. 8A-8I schematically depict various pathways that are altered through the gene editing techniques disclosed herein. FIG. 8A shows a schematic of the inhibitory effects of TGF-beta release by tumor cells in the tumor microenvironment. FIG. 8B shows a schematic of the CIS/CISH negative regulatory pathways on IL-15 function. FIG. 8C depicts a non-limiting schematic process flow for generation of a engineered non-alloreactive T cells and engineered NK cells for use in a combination therapy according to several embodiments disclosed herein. FIG. 8D shows a schematic of the signaling pathways that can lead to graft vs. host disease. FIG. 8E shows a schematic of how several embodiments disclosed herein can reduce and/or eliminate graft vs. host disease. FIG. 8F shows a schematic of the signaling pathways that can lead to host vs. graft rejection. FIG. 8G shows a schematic of several embodiments disclosed herein that can reduce and/or eliminate host vs. graft rejection. FIG. 8H shows a schematic of how edited immune cells can act against other edited immune cells in mixed cell product. FIG. 8I shows a schematic of how several embodiments disclosed herein can reduce and/or eliminate host immune effects against edited immune cells.

[0203] FIGS. 9A-9G show flow cytometry data related to the use of various guide RNAs to reduce expression of TGFBR2 by NK cells. FIG. 9A shows control data. FIG. 9B shows data resulting from use of guide RNA 1; FIG. 9C shows data resulting from use of guide RNA 2; FIG. 9D shows data resulting from use of guide RNA 3; FIG. 9E shows data resulting from use of guide RNA 1 and guide RNA 2; FIG. 9F shows data resulting from use of guide RNA 1 and guide RNA 3; and FIG. 9G shows data resulting from use of guide RNA 2 and guide RNA 3. Expression was evaluated 7 days after electroporation with the indicated guide RNAs.

[0204] FIGS. 10A-10G show next generation sequence data related to the reduction of expression of TGFBR2 by NK cells in response to electroporation with various guide RNAs. FIG. 10A shows control data. FIG. 10B shows data resulting from use of guide RNA 1; FIG. 10C shows data resulting from use of guide RNA 2; FIG. 10D shows data resulting from use of guide RNA 3; FIG. 10E shows data resulting from use of guide RNA 1 and guide RNA 2; FIG. 10F shows data resulting from use of guide RNA 1 and guide RNA 3; and FIG. 10G shows data resulting from use of guide RNA 2 and guide RNA 3.

[0205] FIGS. 11A-11D show data comparing the cytotoxicity of NK cells against tumor cells in the presence or absence of TGFbeta after knockdown of TGFBR2 expression by CRISPr/Cas9. FIG. 11A shows the change in cytotoxicity after TGFBR2 knockdown using guide RNAs 1 and 2. FIG. 11B shows the change in cytotoxicity after TGFBR2 knockdown using guide RNAs 1 and 3 FIG. 11C shows the change in cytotoxicity after TGFBR2 knockdown using guide RNAs 2 and 3. FIG. 11D shows data for mock TGFBR2 knockdown.

[0206] FIGS. 12A-12F show flow cytometry data related to the reduced expression of TGFBR2 by additional guide RNAs. FIG. 12A shows an unstained control of the same cells expressing TGFBR2. FIG. 12B shows positive control data for NK cells expressing TGFBR2 in the absence of electroporation with the CRISPr/Cas9 gene editing elements. FIG. 12C shows knockdown of TGFBR2 expression when guide RNA 4 was used. FIG. 12D shows knockdown of TGFBR2 expression when guide RNA 5 was used. FIG. 12E shows knockdown of TGFBR2 expression when guide RNA 6 was used. FIG. 12F shows knockdown of TGFBR2 expression when a 1:1 ratio of guide RNA 2 and 3 was used. Data were collected at 4 days post electroporation with the CRISPr/Cas9 gene editing elements.

[0207] FIGS. 13A-13F show flow cytometry data related to the expression of a non-limiting example of a chimeric antigen receptor (here an anti-CD19 CAR, NK19-1) by NK cells when subject to CRISPr/Cas9-mediated knockdown of TGFBR2. FIG. 13A shows a negative control for NK cells not engineered to express NK19-1. FIG. 13B shows positive control data for NK cells engineered to express NK19-1, but not electroporated with the CRISPr/Cas9 gene editing elements. FIG. 13C shows data related to NK19-1 expression on NK cells subjected to electroporation with guide RNA 4 to knock down TGFBR2 expression. FIG. 13D shows data related to NK19-1 expression on NK cells subjected to electroporation with guide RNA 5 to knock down TGFBR2 expression. FIG. 13E shows data related to NK19-1 expression on NK cells subjected to electroporation with guide RNA 6 to knock down TGFBR2 expression. FIG. 13F shows data related to NK19-1 expression on NK cells subjected to electroporation with guide RNAs 2 and 3 to knock down TGFBR2 expression. Data were collected at 4 days post-transduction with the vector encoding NK19-1.

[0208] FIGS. 14A-14D show data related to the resistance of NK cells expressing a non-limiting example of a CAR (here an anti-CD19 CAR, NK19-1) to TGFbeta inhibition as a result of single guide RNA knockdown of TGFBR2 expression. FIG. 14A shows cytotoxicity of the NK cells against Nalm6 tumor cells where the NK cells were cultured with the Nalm6 cells in TGFbeta in order to recapitulate the tumor microenvironment. FIGS. 14B and 14C show control data (14C) where the TGFB2 receptor was not knocked out and FIG. 14C shows selected data curves extracted from 14A in order to show the selected curves more clearly. FIG. 14D shows a schematic of the treatment of the NK cells. NK cells were subject to electroporation with CRISPr/Cas9 and a single guide RNA at Day 0 and were cultured in high IL-2 media for 1 day, followed by low-IL-2 culture with feeder cells (e.g., modified K562 cells expressing, for example, 4-1BBL and/or mbIL15). At Day 7, NK cells were transduced with a virus encoding the NK19-1 CAR construct. At Day 14, the cytotoxicity of the resultant NK cells was evaluated.

[0209] FIGS. 15A-15D show data related to the enhanced cytokine secretion by primary and NK19-1-expressing NK cells. FIG. 15A shows data related to secretion of IFNgamma. FIG. 15B shows data related to secretion of GM-CSF. FIG. 15C shows data related to secretion of Granzyme B. FIG. 15D shows data related to secretion of TNF-alpha.

[0210] FIGS. 16A-16D show data related to knockout of NKG2A expression by NK cells through use of CRISPr/Cas9. FIG. 16A shows expression of NKG2A by NK cells subjected to a mock gene editing protocol. FIG. 16B shows NKG2A expression by NK cells after editing with CRISPr/Cas9 and guide RNA 1. FIG. 16C shows NKG2A expression by NK cells after editing with CRISPr/Cas9 and guide RNA 2. FIG. 16D shows NKG2A expression by NK cells after editing with CRISPr/Cas9 and guide RNA 3.

[0211] FIGS. 17A-17B show data related to the cytotoxicity of NK cells with knocked-out NKG2A expression (as compared to mock cells). FIG. 17A shows cytotoxicity of the NKG2A-edited NK cells against REH cells at 7 days post-electroporation with the CRISPr/Cas9 gene editing elements. FIG. 17B shows flow cytometry data related to the degree of HLA-E expression on REH cells.

[0212] FIG. 18 shows data related to the cytotoxicity of mock NK cells or NK cells where Cytokine-inducible SH2-containing protein (CIS) expression was knocked out by gene editing of the CISH gene, which encodes CIS in humans. CIS is an inhibitory checkpoint in NK cell-mediated cytotoxicity. NK-cell cytotoxicity against REH tumor cells was measured at 7 days post-electroporation with the CRISPr/Cas9 gene editing elements.

[0213] FIGS. 19A-19E show data related to the impact of CISH-knockout on expression of a non-limiting example of a chimeric antigen receptor construct (here an anti-CD19 CAR, NK19-1) by NK cells. FIG. 19A shows CD19 CAR expression (as measured by FLAG expression, which is included in this construct for detection purposes, while additional embodiments of the CAR do not comprise a tag) in control (untransduced) NK cells. FIG. 19B shows anti-CD19 CAR expression in NK cells subjected to CISH knockdown using CRISPr/Cas9 and guide RNA 1. FIG. 19C shows anti-CD19 CAR expression in NK cells subjected to CISH knockdown using CRISPr/Cas9 and guide RNA 2. FIG. 19D shows anti-CD19 CAR expression in NK cells subjected to mock gene-editing conditions (electroporation only). FIG. 19E shows a Western Blot depicting the loss of the CIS protein band at 35 kDa, indicating knockout of the CISH gene.

[0214] FIGS. 20A-20B show data from a cytotoxicity assay using donor NK cells modified through gene editing and/or engineered to express a CAR against Nalm6 tumor cells. FIG. 20A shows data from a single challenge assay at a 1:2 effector:target ratio with data collected 7 days post-transduction of the indicated CAR constructs. FIG. 20B shows data from a double challenge model, where the control, edited, and/or edited/engineered NK cells were challenged with Nalm6 tumor cells at two time points.

[0215] FIGS. 21A-21B show data related CISH knockout NK cell survival and cytotoxicity over extended time in culture. FIG. 21A shows NK cell survival data over time when NK cells were treated as indicated. FIG. 21B shows NK cell cytotoxicity data against tumor cells after being cultured for 100 days.

[0216] FIGS. 22A-22E show cytokine release data by NK cells treated with the indicated control, gene editing, or gene editing+ engineered to express a CAR conditions. FIG. 22A shows data related to interferon gamma release. FIG. 22B shows data related to tumor necrosis factor alpha release. FIG. 22C shows data related to GM-CSF release. FIG. 22D shows data related to Granzyme B release. FIG. 22E shows data related to perforin release.

[0217] FIGS. 23A-23C show data from a cytotoxicity assay of mock NK cells or NK cells where either Cbl proto-oncogene B (CBLB) or tripartite motif-containing protein 29 (TRIM29) expression was knocked out by CRISPR/Cas9 gene editing. FIG. 23A shows cytotoxicity data for NK cells knocked out with three different CBLB gRNAs, CISH gRNA 5, or mock NK cells. FIG. 23B shows cytotoxicity data for NK cells knocked out with three different TRIM19 gRNAs, CISH gRNA 5, or mock NK cells. FIG. 23C shows the timeline for electroporation and cytotoxicity assay.

[0218] FIGS. 24A-24C show data from a time course cytotoxicity assay of mock NK cells or NK cells where either suppressor of cytokine signaling 2 (SOCS2) or CISH expression was knocked out by CRISPR/Cas9 gene editing. FIG. 24A shows time course cytotoxicity data for NK cells knocked out with three different SOCS2 gRNAs, CISH gRNA 2, or CD45 gRNA using the MaxCyte electroporation system. FIG. 24B shows time course cytotoxicity data for NK cells knocked out with three different SOCs2 gRNAs, CISH gRNA 2 or CD45 gRNA using the Lonza electroporation system. FIG. 24C shows the timeline for electroporation and cytotoxicity assay.

[0219] FIGS. 25A-25D show schematic depictions of non-limiting modifications made to CARs according to embodiments disclosed herein. FIG. 25A shows a non-limiting embodiment in which a single immunosuppressive effector is integrated into the hinge domain of the CAR. FIG. 25B shows a non-limiting embodiment in which multiple domains are integrated into the CAR, with a first immunosuppressive effector being of a different type than a second immunosuppressive effector. In some embodiments, a plurality of immunosuppressive effectors are included (e.g., 2, 3, 4, 5 or more), with the immunosuppressive effectors optionally being the same, or different, from any other immunosuppressive effector in the CAR. FIG. 25C shows a non-limiting embodiment wherein the immunosuppressive effector is positioned the target binding region (e.g., on the linker between the heavy and light chains of an scFv). FIG. 25D shows a non-limiting embodiment wherein the immunosuppressive effector is positioned at the N-terminus of a chimeric antigen receptor.

[0220] FIGS. 26A-26J show schematic depictions of non-limiting modifications made to immune cells, which are optionally allogeneic immune cells. FIG. 26A shows an immune cell engineered to express an immunosuppressive effector in a membrane-bound format, based on being tethered to a transmembrane protein (or fragment thereof). FIG. 26B shows an immune cell engineered to express multiple immunosuppressive effectors in a membrane-bound format. FIG. 26C shows an immune cell engineered to express multiple immunosuppressive effectors in a membrane-bound format, with each of the two effectors differing from one another. FIG. 26D shows an immune cell engineered to express multiple immunosuppressive effectors tethered to a single transmembrane protein. FIG. 26E shows an immune cell engineered to express multiple immunosuppressive effectors tethered to a single transmembrane protein, wherein the domains differ from one another. FIG. 26F shows an immune cell engineered to express multiple immunosuppressive effectors in a membrane-bound format, with each of the two effectors tethered to one of the transmembrane proteins differing from one another. FIG. 26G shows an immune cell engineered to express a membrane-bound immunosuppressive effector in conjunction with a CAR comprising one or more immunosuppressive effectors (though in some embodiments the CAR does not include an immunosuppressive effector domain). FIG. 26H shows an immune cell engineered to express two immunosuppressive effectors in a membrane-bound format in conjunction with a CAR comprising one or more immunosuppressive effectors. FIG. 26I shows an immune cell engineered to express a membrane-bound immunosuppressive effector in conjunction with a CAR comprising one or more immunosuppressive effectors and also to express one or more of HLA-E and/or HLA-G. In some embodiments like that schematically depicted, the engineered cells are NK cells that have been gene edited to disrupt B2M expression. FIG. 26J shows an immune cell engineered to express multiple immunosuppressive effectors, a CAR comprising at least one immunosuppressive effector, as well HLA-E and/or HLA-G, CD47, PD-L1, and/or the Poliovirus Receptor (PVR). While all are depicted on a single cell, any combination of the immunosuppressive effectors, or any one alone, shown in the Figures or disclosed herein may be used.

[0221] FIGS. 27A-27JJ depict schematics of non-limiting embodiments of immunosuppressive effector constructs as provided for herein.

[0222] FIG. 28 depicts a non-limiting schematic of an immune cell engineered to express a chimeric UL18-B2M construct.

[0223] FIGS. 29A-29C depict schematic diagrams related to constructs and experimental design disclosed herein. FIG. 29A shows a schematic diagram of various scenarios in which immunosuppression edits or constructs are made and the resultant self versus non-self outcome. FIG. 29B shows a schematic of a disulfide trap single chain trimer (dtSCT) used to express various immune evasion peptides (modified from Hansen et al. Current Protocols in Immunology, 2009). FIG. 29C shows a schematic of an experimental design to assess the efficacy of the hypoimmune constructs provided for herein

[0224] FIGS. 30A-30C show data related to the survival of B2M knockout T cells (as a percentage of live T cells) after co-culturing with NK cells engineered to express a non-limiting anti-CD19 CAR. FIG. 30A shows survival levels at an NK:T cell ration of 1:4. FIG. 30B shows survival at an NK:T ratio of 1:2. FIG. 30C shows survival at an NK:T ratio of 1:1.

[0225] FIGS. 31A-31C shows additional data related to HLA-E expression and effectiveness of reducing B2M deficient T cell elimination using T cell from an additional donor. FIG. 31A shows T cell survival at an NK:T cell ratio of 1:4. FIG. 31B shows T cell survival at an NK:T cell ratio of 1:2. FIG. 31C shows T cell survival at an NK:T cell ratio of 1:1.

[0226] FIG. 32 shows a schematic of the pathways by which HLA-E acts on NK cells.

[0227] FIGS. 33A-33D show data related to expression of NKG2A on NK cells and B2M on T cells for two donors after co-culturing the NK and T cells at various ratios.

[0228] FIG. 34 provides phenotypic characteristics around the characteristics of NK cell cells to be tested for their compatibility in a mixed cell product.

[0229] FIG. 35 provides phenotypic characteristics around the characteristics of T cells to be tested for their compatibility in a mixed cell product.

[0230] FIGS. 36A-36F show data related the percentage of B2M-negative cells among live T-cells when T cells expressing an anti-CD19 CAR and engineered for immune evasion according to embodiments disclosed herein are cultured with NK cells at various NK:T cell ratios. FIG. 36A shows data at an NK:T ratio of 0:1; FIG. 36B shows an NK:T ratio of 1:4; FIG. 36C shows an NK:T ratio of 1:2; FIG. 36D shows an NK:T ratio of 1:1, FIG. 36E shows an NK:T ratio of 2:1, and FIG. 36F shows an NK:T ratio of 4:1.

[0231] FIGS. 36G-36L show data related the percentage of B2M-negative cells among live T-cells when T cells expressing an anti-CD19 CAR and engineered for immune evasion according to embodiments disclosed herein are cultured with NK cells also expressing an anti-CD19 CAR, at various NK:T cell ratios. FIG. 36G shows data at an NK:T ratio of 0:1; FIG. 36H shows an NK:T ratio of 1:4; FIG. 36I shows an NK:T ratio of 1:2; FIG. 36J shows an NK:T ratio of 1:1, FIG. 36K shows an NK:T ratio of 2:1, and FIG. 36L shows an NK:T ratio of 4:1.

[0232] FIGS. 37A-37F show data related the percentage of B2M-negative cells among live T-cells when T cells (collected from a first donor) expressing an anti-CD19 CAR and engineered for immune evasion according to embodiments disclosed herein are cultured with NK cells also expressing an anti-CD19 CAR, at various NK:T cell ratios. FIG. 37A shows data at an NK:T ratio of 0:1; FIG. 37B shows an NK:T ratio of 1:4; FIG. 37C shows an NK:T ratio of 1:2; FIG. 37D shows an NK:T ratio of 1:1, FIG. 37E shows an NK:T ratio of 2:1, and FIG. 37F shows an NK:T ratio of 4:1.

[0233] FIGS. 38A-38F show data related the percentage of B2M-negative cells among live T-cells when T cells (collected from a second donor) expressing an anti-CD19 CAR and engineered for immune evasion according to embodiments disclosed herein are cultured with NK cells also expressing an anti-CD19 CAR, at various NK:T cell ratios. FIG. 38A shows data at an NK:T ratio of 0:1; FIG. 38B shows an NK:T ratio of 1:4; FIG. 38C shows an NK:T ratio of 1:2; FIG. 38D shows an NK:T ratio of 1:1, FIG. 38E shows an NK:T ratio of 2:1, and FIG. 38F shows an NK:T ratio of 4:1.

[0234] FIGS. 39A-39F show data related the percentage of B2M-negative cells among live T-cells when T cells (collected from a third donor) expressing an anti-CD19 CAR and engineered for immune evasion according to embodiments disclosed herein are cultured with NK cells also expressing an anti-CD19 CAR, at various NK:T cell ratios. FIG. 39A shows data at an NK:T ratio of 0:1; FIG. 39B shows an NK:T ratio of 1:4; FIG. 39C shows an NK:T ratio of 1:2; FIG. 39D shows an NK:T ratio of 1:1, FIG. 39E shows an NK:T ratio of 2:1, and FIG. 39F shows an NK:T ratio of 4:1.

[0235] FIGS. 40A-40F show data related the percentage of B2M-negative cells among live T-cells when T cells (collected from a first donor) expressing an anti-CD19 CAR and engineered for immune evasion (either with a TCR knockout, a TCR knockout and B2M knockout, or A TCR knockout with a B2M knockout and a re-expression of an HLA) are cultured with NK cells also expressing an anti-CD19 CAR, at various NK:T cell ratios. FIG. 40A shows data at an NK:T ratio of 0:1; FIG. 40B shows an NK:T ratio of 1:4; FIG. 40C shows an NK:T ratio of 1:2; FIG. 40D shows an NK:T ratio of 1:1, FIG. 40E shows an NK:T ratio of 2:1, and FIG. 40F shows an NK:T ratio of 4:1.

[0236] FIGS. 41A-41F show data related the percentage of B2M-negative cells among live T-cells when T cells (collected from a first donor) expressing an anti-CD19 CAR and engineered for immune evasion (either with a TCR knockout, a TCR knockout and B2M knockout, or A TCR knockout with a B2M knockout and a re-expression of an HLA) are cultured with NK cells also expressing an anti-CD19 CAR, at various NK:T cell ratios. FIG. 41A shows data at an NK:T ratio of 0:1; FIG. 41B shows an NK:T ratio of 1:4; FIG. 41C shows an NK:T ratio of 1:2; FIG. 41D shows an NK:T ratio of 1:1, FIG. 41E shows an NK:T ratio of 2:1, and FIG. 41F shows an NK:T ratio of 4:1.

[0237] FIGS. 42A-42B show schematics of various approaches to reduce immune responses against engineered therapeutic cells. FIG. 42A depicts a schematic of a CAR comprising a hypoimmune domain (HYPO) and various peptides or HLA sequences that are used to reduce immune responses against engineered therapeutic cells. FIG. 42B depicts various peptides and combinations of peptides that are used to reduce immune responses against engineered therapeutic cells.

[0238] FIG. 43 shows a schematic of an experimental design that allows for the evaluation of the various hypoimmunity-inducing embodiments disclosed herein.

[0239] FIG. 44 shows cytotoxicity data to evaluate hypoimmunity-inducing constructs according to embodiments provided for herein.

[0240] FIGS. 45A-45C show additional cytotoxicity data collected while evaluating hypoimmunity-inducing constructs according to embodiments provided for herein. FIG. 45A shows cytotoxicity data using NK cells from a first donor against K562 cells expressing various hypoimmune constructs. FIG. 45B shows cytotoxicity data using NK cells from an additional donor against K562 cells expressing various hypoimmune constructs. FIG. 45C shows cytotoxicity data using immortalized NK92 cells against K562 cells expressing various hypoimmune constructs.

[0241] FIG. 46 depicts an analysis of NKG2A expression by donor NK cells.

[0242] FIGS. 47A-47R show experimental setup and data related to cytotoxicity of various immune constructs provided for in embodiments disclosed herein. FIG. 47A shows a non-limiting schematic of an assay procedure for assessing the immune evasion effects of various constructs provided for in embodiments herein. FIG. 47B shows cytotoxicity curves after hypoimmune modified K562 cells were co-cultured with activated NK cells from a first donor. FIG. 47C shows a histogram depicting the detection of GFP expressed by the modified K562 cells, representing the degree of expression of the indicated hypoimmune construct. FIG. 47D shows cytotoxicity curves after hypoimmune modified K562 cells were co-cultured with activated NK cells from a second donor. FIG. 47E shows a histogram depicting the detection of GFP expressed by the modified K562 cells, representing the degree of expression of the indicated hypoimmune construct. FIG. 47F shows cytotoxicity curves after hypoimmune modified K562 cells were co-cultured with activated NK cells from a third donor. FIG. 47G shows a histogram depicting the detection of GFP expressed by the modified K562 cells, representing the degree of expression of the indicated hypoimmune construct. FIG. 47H shows cytotoxicity curves after hypoimmune modified K562 cells were co-cultured with activated NK cells from a donor. FIG. 47I shows a histogram depicting the detection of GFP expressed by the modified K562 cells, representing the degree of expression of the indicated hypoimmune construct. FIG. 47J shows cytotoxicity curves after hypoimmune modified K562 cells were co-cultured with activated NK cells from a donor. FIG. 47K shows a histogram depicting the detection of GFP expressed by the modified K562 cells, representing the degree of expression of the indicated hypoimmune construct. FIG. 47L shows cytotoxicity curves after hypoimmune modified K562 cells were co-cultured with activated NK cells from a donor. FIG. 47M shows a histogram depicting the detection of GFP expressed by the modified K562 cells, representing the degree of expression of the indicated hypoimmune construct. FIG. 47N shows cytotoxicity curves after hypoimmune modified K562 cells were co-cultured with activated NK cells from a donor. FIG. 47O shows a histogram depicting the detection of GFP expressed by the modified K562 cells, representing the degree of expression of the indicated hypoimmune construct. FIG. 47P shows a summary tabulation of the screening of the indicated hypoimmune constructs. FIG. 47Q shows cytotoxicity curves after hypoimmune modified K562 cells were co-cultured with activated NK cells from a donor. FIG. 47R shows a histogram depicting the detection of GFP expressed by the modified K562 cells, representing the degree of expression of the indicated hypoimmune construct.

[0243] FIGS. 48A-48B show cytotoxicity data from a variety of hypoimmune constructs as provided for herein. FIG. 48A shows cytotoxicity curves for K562 cells modified to express the indicated immune evasion constructs that were co-cultured with activated donor NK cells. FIG. 48B shows a histogram depicting the detection of GFP expressed by the modified K562 cells, representing the degree of expression of the indicated hypoimmune construct.

[0244] FIGS. 49A-49C show data correlating the degree of expression of selected hypoimmune constructs provided for herein with immune protection. FIG. 49A shows cytotoxicity curves for high HLA-E expressing K562NR cells and low HLA-E expressing K562NR cells as well as a summary table reflecting the relative expression of the HLA-E construct by both sets of cells. FIG. 49B shows cytotoxicity curves for high CD47 expressing K562NR cells and low CD47 expressing K562NR cells as well as a summary table reflecting the relative expression of the CD47 construct by both sets of cells. FIG. 49C shows cytotoxicity curves for high CD43_TM expressing K562NR cells and low CD47_TM expressing K562NR cells as well as a summary table reflecting the relative expression of the CD47_TM construct by both sets of cells.

[0245] FIGS. 50A-50D show data from non-limiting embodiments of combinations of gene edits made to NK cells and the resultant cytotoxicity. FIG. 50A shows data with the indicated edits made in NK cells and an evaluation of cytotoxicity against target 786-O cells 14 days after the edits were made. FIG. 50B shows data corresponding to that shown in FIG. 50A, but in the presence of TGFb. FIG. 50C shows data with the indicated edits made in NK cells and an evaluation of cytotoxicity against target 786-O cells 21 days after the edits were made. FIG. 50D shows data corresponding to that shown in FIG. 9C, but in the presence of TGFb.

[0246] FIGS. 51A-51D show data from non-limiting embodiments of combinations of gene edits made to NK cells and the resultant cytotoxicity. FIG. 51A shows data with the indicated edits made in NK cells and an evaluation of cytotoxicity against target 786-O cells 14 days after the edits were made. FIG. 51B shows data corresponding to that shown in FIG. 51A, but in the presence of TGFb. FIG. 51C shows data with the indicated edits made in NK cells and an evaluation of cytotoxicity against target ACHN cells 21 days after the edits were made. FIG. 51D shows data corresponding to that shown in FIG. 51C, but in the presence of TGFb.

[0247] FIGS. 52A-52B show data related to the cytotoxicity of NK cells edited at the indicated genes against target cells. FIG. 52A shows data with the indicated edits made in NK cells and an evaluation of cytotoxicity against target 786-O cells 21 days after the edits were made. FIG. 52B shows data corresponding to that shown in FIG. 52A, but in the presence of adenosine.

[0248] FIGS. 53A-53D show data related to the cytotoxicity of NK cells edited at multiple gene targets. FIG. 53A shows data related to NK cells edited in the indicated manner and their cytotoxicity against target 786-O cells 14 days post-edit. FIG. 53B shows summary data of the traces in FIG. 53A. FIG. 53C shows data related to NK cells edited in the indicated manner and their cytotoxicity against target 786-O cells 14 days post-edit in the presence of TGFb. FIG. 53D shows summary data of the traces in FIG. 53C.

[0249] FIGS. 54A-54B show data related to the cytotoxicity of NK cells edited at multiple gene targets. FIG. 53A shows data related to NK cells edited in the indicated manner and their cytotoxicity against target ACHN cells 14 days post-edit. FIG. 54B shows data related to NK cells edited in the indicated manner and their cytotoxicity against target ACHN cells 14 days post-edit in the presence of TGFb

[0250] FIGS. 55A-55D show data related to the cytotoxicity of NK cells edited at multiple gene targets. FIG. 55A shows data related to NK cells edited in the indicated manner and their cytotoxicity against target 786-O cells 28 days post-edit. FIG. 55B shows summary data of the traces in FIG. 55A. FIG. 55C shows data related to NK cells edited in the indicated manner and their cytotoxicity against target 786-O cells 28 days post-edit in the presence of TGFb. FIG. 55D shows summary data of the traces in FIG. 55C.

[0251] FIGS. 56A-56D show data related to the cytotoxicity of NK cells edited at multiple gene targets. FIG. 56A shows data related to NK cells edited in the indicated manner and their cytotoxicity against target ACHN cells 28 days post-edit. FIG. 56B shows summary data of the traces in FIG. 56A. FIG. 56C shows data related to NK cells edited in the indicated manner and their cytotoxicity against target ACHN cells 28 days post-edit in the presence of TGFb. FIG. 56D shows summary data of the traces in FIG. 56C.

### DETAILED DESCRIPTION

[0252] Some embodiments of the methods and compositions provided herein relate to engineered immune cells and combinations of the same for use in immunotherapy. In several embodiments, the engineered cells are engineered in multiple ways, for example, to express a cytotoxicity-inducing receptor complex. As used herein, the term “cytotoxic receptor complexes” shall be given its ordinary meaning and shall also refer to (unless otherwise indicated), Chimeric Antigen Receptors (CAR), chimeric receptors (also called activating chimeric receptors in the case of NKG2D chimeric receptors). In several embodiments, the cells are further engineered to achieve a modification of the reactivity of the cells against non-tumor tissue. Several embodiments relate to the modification of T cells, through various genetic engineering methodologies, such that the resultant T cells have reduced and/or eliminated alloreactivity. Such non-alloreactive T cells can also be engineered to express a chimeric antigen receptor (CAR) that enables the non-alloreactive T cells to impart cytotoxic effects against tumor cells. In several embodiments, natural killer (NK) cells are also engineered to express a city-inducing receptor complex (e.g., a chimeric antigen receptor or chimeric receptor). In several embodiments, combinations of these engineered immune cell types are used in immunotherapy, which results in both a rapid (NK-cell based) and persistent (T-cell based) anti-tumor effect, all while advantageously having little to no graft versus host disease. Some embodiments include methods of use of the compositions or cells in immunotherapy.

[0253] The term “anticancer effect” refers to a biological effect which can be manifested by various means, including but not limited to, a decrease in tumor volume, a decrease in the number of cancer cells, a decrease in the number of metastases, an increase in life expectancy, decrease in cancer cell proliferation, decrease in cancer cell survival, and/or amelioration of various physiological symptoms associated with the cancerous condition.

### Cell Types

[0254] Some embodiments of the methods and compositions provided herein relate to a cell such as an immune cell. For example, an immune cell, such as a T cell, may be engineered to include a chimeric receptor such as a CD19-directed chimeric receptor, or engineered to include a nucleic acid encoding said chimeric receptor as described herein. Additional embodiments relate to engineering a second set of cells to express another cytotoxic receptor complex, such as an NKG2D chimeric receptor complex as disclosed herein. Still additional embodiments relate to the further genetic manipulation of T cells (e.g., donor T cells) to reduce, disrupt, minimize and/or eliminate the ability of the donor T cell to be alloreactive against recipient cells (graft versus host disease).

[0255] Traditional anti-cancer therapies relied on a surgical approach, radiation therapy, chemotherapy, or combinations of these methods. As research led to a greater understanding of some of the mechanisms of certain cancers, this knowledge was leveraged to develop targeted cancer therapies. Targeted therapy is a cancer treatment that employs certain drugs that target specific genes or proteins found in cancer cells or cells supporting cancer growth, (like blood vessel cells) to reduce or arrest cancer cell growth. More recently, genetic engineering has enabled approaches to be developed that harness certain aspects of the immune system to fight cancers. In some cases, a patient's own immune cells are modified to specifically eradicate that patient's type of cancer. Various types of immune cells can be used, such as T cells, Natural Killer (NK cells), or combinations thereof, as described in more detail below.

[0256] To facilitate cancer immunotherapies, there are provided for herein polynucleotides, polypeptides, and vectors that encode chimeric antigen receptors (CAR) that comprise a target binding moiety (e.g., an extracellular binder of a ligand, or a tumor marker-directed chimeric receptor, expressed by a cancer cell) and a cytotoxic signaling complex. For example, some embodiments include a polynucleotide, polypeptide, or vector that encodes, for example a chimeric antigen receptor directed against a tumor marker, for example, CD19, CD123, CD70, Her2, mesothelin, Claudin 6, BCMA, EGFR, among others, to facilitate targeting of an immune cell to a cancer and exerting cytotoxic effects on the cancer cell. Also provided are engineered immune cells (e.g., T cells or NK cells) expressing such CARs. There are also provided herein, in several embodiments, polynucleotides, polypeptides, and vectors that encode a construct comprising an extracellular domain comprising two or more subdomains, e.g., first CD19-targeting subdomain comprising a CD19 binding moiety as disclosed herein and a second subdomain comprising a C-type lectin-like receptor and a cytotoxic signaling complex. Also provided are engineered immune cells (e.g., T cells or NK cells) expressing such bi-specific constructs. Methods of treating cancer and other uses of such cells for cancer immunotherapy are also provided for herein.

[0257] To facilitate cancer immunotherapies, there are also provided for herein polynucleotides, polypeptides, and vectors that encode chimeric receptors that comprise a target binding moiety (e.g., an extracellular binder of a ligand expressed by a cancer cell) and a cytotoxic signaling complex. For example, some embodiments include a polynucleotide, polypeptide, or vector that encodes, for example an activating chimeric receptor comprising an NKG2D extracellular domain that is directed against a tumor marker, for example, MICA, MICB, ULBP1, ULBP2, ULBP3, ULBP4, ULBP5, and ULBP6, among others, to facilitate targeting of an immune cell to a cancer and exerting cytotoxic effects on the cancer cell. Also provided are engineered immune cells (e.g., T cells or NK cells) expressing such chimeric receptors. There are also provided herein, in several embodiments, polynucleotides, polypeptides, and vectors that encode a construct comprising an extracellular domain comprising two or more subdomains, e.g., first and second ligand binding receptor and a cytotoxic signaling complex. Also provided are engineered immune cells (e.g., T cells or NK cells) expressing such bi-specific constructs (in some embodiments the first and second ligand binding domain target the same ligand). Methods of treating cancer and other uses of such cells for cancer immunotherapy are also provided for herein.

### Engineered Cells for Immunotherapy

[0258] In several embodiments, cells of the immune system are engineered to have enhanced cytotoxic effects against target cells, such as tumor cells. For example, a cell of the immune system may be engineered to include a tumor-directed chimeric receptor and/or a tumor-directed CAR as described herein. In several embodiments, white blood cells or leukocytes, are used, since their native function is to defend the body against growth of abnormal cells and infectious disease. There are a variety of types of white bloods cells that serve specific roles in the human immune system, and are therefore a preferred starting point for the engineering of cells disclosed herein. White blood cells include granulocytes and agranulocytes (presence or absence of granules in the cytoplasm, respectively). Granulocytes include basophils, eosinophils, neutrophils, and mast cells. Agranulocytes include lymphocytes and monocytes. Cells such as those that follow or are otherwise described herein may be engineered to include a chimeric receptor, such as an NKG2D chimeric receptor, and/or a CAR, such as a CD19-directed CAR, or a nucleic acid encoding the chimeric receptor or the CAR. In several embodiments, the cells are optionally engineered to co-express a membrane-bound interleukin 15 (mbIL15) co-stimulatory domain. As discussed in more detail below, in several embodiments, the cells, particularly T cells, are further genetically modified to reduce and/or eliminate the alloreactivity of the cells.

### Monocytes for Immunotherapy

[0259] Monocytes are a subtype of leukocyte. Monocytes can differentiate into macrophages and myeloid lineage dendritic cells. Monocytes are associated with the adaptive immune system and serve the main functions of phagocytosis, antigen presentation, and cytokine production. Phagocytosis is the process of uptake of cellular material, or entire cells, followed by digestion and destruction of the engulfed cellular material. In several embodiments, monocytes are used in connection with one or more additional engineered cells as disclosed herein. Some embodiments of the methods and compositions described herein relate to a monocyte that includes a tumor-directed CAR, or a nucleic acid encoding the tumor-directed CAR. Several embodiments of the methods and compositions disclosed herein relate to monocytes engineered to express a CAR that targets a tumor marker, for example, CD19, CD123, CD70, Her2, mesothelin, Claudin 6, BCMA, EGFR, among any of the others disclosed herein, and a membrane-bound interleukin 15 (mbIL15) co-stimulatory domain. Several embodiments of the methods and compositions disclosed herein relate to monocytes engineered to express an activating chimeric receptor that targets a ligand on a tumor cell, for example, MICA, MICB, ULBP1, ULBP2, ULBP3, ULBP4, ULBP5, and ULBP6 (among others) and optionally a membrane-bound interleukin 15 (mbIL15) co-stimulatory domain.

### Lymphocytes for Immunotherapy

[0260] Lymphocytes, the other primary sub-type of leukocyte include T cells (cell-mediated, cytotoxic adaptive immunity), natural killer cells (cell-mediated, cytotoxic innate immunity), and B cells (humoral, antibody-driven adaptive immunity). While B cells are engineered according to several embodiments, disclosed herein, several embodiments also relate to engineered T cells or engineered NK cells (mixtures of T cells and NK cells are used in some embodiments, either from the same donor, or different donors). Several embodiments of the methods and compositions disclosed herein relate to lymphocytes engineered to express a CAR that targets a tumor marker, for example, CD19, CD123, CD70, Her2, mesothelin, Claudin 6, BCMA, EGFR, among any of the others disclosed herein, and a membrane-bound interleukin 15 (mbIL15) co-stimulatory domain. Several embodiments of the methods and compositions disclosed herein relate to lymphocytes engineered to express an activating chimeric receptor that targets a ligand on a tumor cell, for example, MICA, MICB, ULBP1, ULBP2, ULBP3, ULBP4, ULBP5, and ULBP6 (among others) and optionally a membrane-bound interleukin 15 (mbIL15) co-stimulatory domain.

### T Cells for Immunotherapy

[0261] T cells are distinguishable from other lymphocytes sub-types (e.g., B cells or NK cells) based on the presence of a T-cell receptor on the cell surface. T cells can be divided into various different subtypes, including effector T cells, helper T cells, cytotoxic T cells, memory T cells, regulatory T cells, natural killer T cell, mucosal associated invariant T cells and gamma delta T cells. In some embodiments, a specific subtype of T cell is engineered. In some embodiments, a mixed pool of T cell subtypes is engineered. In some embodiments, there is no specific selection of a type of T cells to be engineered to express the cytotoxic receptor complexes disclosed herein. In several embodiments, specific techniques, such as use of cytokine stimulation are used to enhance expansion/collection of T cells with a specific marker profile. For example, in several embodiments, activation of certain human T cells, e.g. CD4+ T cells, CD8+ T cells is achieved through use of CD3 and/or CD28 as stimulatory molecules. In several embodiments, there is provided a method of treating or preventing cancer or an infectious disease, comprising administering a therapeutically effective amount of T cells expressing the cytotoxic receptor complex and/or a homing moiety as described herein. In several embodiments, the engineered T cells are autologous cells, while in some embodiments, the T cells are allogeneic cells. Several embodiments of the methods and compositions disclosed herein relate to T cells engineered to express a CAR that targets a tumor marker, for example, CD19, CD123, CD70, Her2, mesothelin, Claudin 6, BCMA, EGFR, among any of the others as disclosed herein, and a membrane-bound interleukin 15 (mbIL15) co-stimulatory domain. Several embodiments of the methods and compositions disclosed herein relate to T cells engineered to express an activating chimeric receptor that targets a ligand on a tumor cell, for example, MICA, MICB, ULBP1, ULBP2, ULBP3, ULBP4, ULBP5, and ULBP6 (among others) and optionally a membrane-bound interleukin 15 (mbIL15) co-stimulatory domain.

### NK Cells for Immunotherapy

[0262] In several embodiments, there is provided a method of treating or preventing cancer or an infectious disease, comprising administering a therapeutically effective amount of natural killer (NK) cells expressing the cytotoxic receptor complex and/or a homing moiety as described herein. In several embodiments, the engineered NK cells are autologous cells, while in some embodiments, the NK cells are allogeneic cells. In several embodiments, NK cells are preferred because the natural cytotoxic potential of NK cells is relatively high. In several embodiments, it is unexpectedly beneficial that the engineered cells disclosed herein can further upregulate the cytotoxic activity of NK cells, leading to an even more effective activity against target cells (e.g., tumor or other diseased cells). Some embodiments of the methods and compositions described herein relate to NK cells engineered to express a CAR that targets a tumor marker, for example, CD19, CD123, CD70, Her2, mesothelin, Claudin 6, BCMA, EGFR, among any of the others disclosed herein, and optionally a membrane-bound interleukin 15 (mbIL15) co-stimulatory domain. Several embodiments of the methods and compositions disclosed herein relate to NK cells engineered to express an activating chimeric receptor that targets a ligand on a tumor cell, for example, MICA, MICB, ULBP1, ULBP2, ULBP3, ULBP4, ULBP5, and ULBP6 (among others) and optionally a membrane-bound interleukin 15 (mbIL15) co-stimulatory domain. In some embodiments, the NK cells are derived from cell line NK-92. NK-92 cells are derived from NK cells, but lack major inhibitory receptors displayed by normal NK cells, while retaining the majority of activating receptors. Some embodiments of NK-92 cells described herein related to NK-92 cell engineered to silence certain additional inhibitory receptors, for example, SMAD3, allowing for upregulation of interferon-γ (IFNγ), granzyme B, and/or perforin production. Additional information relating to the NK-92 cell line is disclosed in WO 1998/49268 and U.S. Patent Application Publication No. 2002-0068044 and incorporated in their entireties herein by reference. NK-92 cells are used, in several embodiments, in combination with one or more of the other cell types disclosed herein. For example, in one embodiment, NK-92 cells are used in combination with NK cells as disclosed herein. In an additional embodiment, NK-92 cells are used in combination with T cells as disclosed herein.

### Hematopoietic Stem Cells for Cancer Immunotherapy

[0263] In some embodiments, hematopoietic stem cells (HSCs) are used in the methods of immunotherapy disclosed herein. In several embodiments, the cells are engineered to express a homing moiety and/or a cytotoxic receptor complex. HSCs are used, in several embodiments, to leverage their ability to engraft for long-term blood cell production, which could result in a sustained source of targeted anti-cancer effector cells, for example to combat cancer remissions. In several embodiments, this ongoing production helps to offset anergy or exhaustion of other cell types, for example due to the tumor microenvironment. In several embodiments allogeneic HSCs are used, while in some embodiments, autologous HSCs are used. In several embodiments, HSCs are used in combination with one or more additional engineered cell type disclosed herein. Some embodiments of the methods and compositions described herein relate to a stem cell, such as a hematopoietic stem cell engineered to express a CAR that targets a tumor marker, for example, CD19, CD123, CD70, Her2, mesothelin, Claudin 6, BCMA, EGFR, among any of the others disclosed herein, and optionally a membrane-bound interleukin 15 (mbIL15) co-stimulatory domain. Several embodiments of the methods and compositions disclosed herein relate to hematopoietic stem cells engineered to express an activating chimeric receptor that targets a ligand on a tumor cell, for example, MICA, MICB, ULBP1, ULBP2, ULBP3, ULBP4, ULBP5, and ULBP6 (among others) and optionally a membrane-bound interleukin 15 (mbIL15) co-stimulatory domain.

### Induced Pluripotent Stem Cells

[0264] In some embodiments, induced pluripotent stem cells (iPSCs) are used in the method of immunotherapy disclosed herein. iPSCs are used, in several embodiments, to leverage their ability to differentiate and derive into non-pluripotent cells, including, but not limited to, CD34 cells, hemogenic endothelium cells, HSCs (hematopoietic stem and progenitor cells), hematopoietic multipotent progenitor cells, T cell progenitors, NK cell progenitors, T cells, NKT cells, NK cells, and B cells comprising one or several genetic modifications at selected sites through differentiating iPSCs or less differentiated cells comprising the same genetic modifications at the same selected sites. In several embodiments, the iPSCs are used to generate iPSC-derived NK or T cells. In several embodiments, the cells are engineered to express a homing moiety and/or a cytotoxic receptor complex. In several embodiments, iPSCs are used in combination with one or more additional engineered cell type disclosed herein. Some embodiments of the methods and compositions described herein relate to a stem cell, such as a induced pluripotent stem cell engineered to express a CAR that targets a tumor marker, for example, CD19, CD123, CD70, Her2, mesothelin, Claudin 6, BCMA, EGFR, among any of the others disclosed herein, and optionally a membrane-bound interleukin 15 (mbIL15) co-stimulatory domain. Several embodiments of the methods and compositions disclosed herein relate to induced pluripotent stem cells engineered to express an activating chimeric receptor that targets a ligand on a tumor cell, for example, MICA, MICB, ULBP1, ULBP2, ULBP3, ULBP4, ULBP5, and ULBP6 (among others) and optionally a membrane-bound interleukin 15 (mbIL15) co-stimulatory domain.

### Genetic Engineering of Immune Cells

[0265] As discussed above, a variety of cell types can be utilized in cellular immunotherapy. Further, as elaborated on in more detail below, and shown in the Examples, genetic modifications can be made to these cells in order to enhance one or more aspects of their efficacy (e.g., cytotoxicity) and/or persistence (e.g., active life span).

### Targets for Gene Editing

[0266] Additional cellular engineering strategies are provided for herein that serve to further enhance the persistence of allogeneic cellular therapy products, such as allogeneic CAR-T cells and/or allogeneic CAR-NK cells. There is provided for herein, in several embodiments, a population of genetically engineered immune cells for cancer immunotherapy where the genetically engineered immune cells are genetically modified (e.g., gene edited) at one, two, three or more gene loci to enhance the cytotoxic activity, persistence, or other feature of the cells, such as NK cells and/or T cells.

[0267] As discussed herein, in several embodiments NK cells are used for immunotherapy. In several embodiments provided for herein, gene editing of the NK cell can advantageously impart to the edited NK cell the ability to resist and/or overcome various inhibitory signals that are generated in the tumor microenvironment. It is known that tumors generate a variety of signaling molecules that are intended to reduce the anti-tumor effects of immune cells. As discussed in more detail below, in several embodiments, gene editing of the NK cell limits this tumor microenvironment suppressive effect on the NK cells, T cells, combinations of NK and T cells, or any edited/engineered immune cell provided for herein. As discussed below, in several embodiments, gene editing is employed to reduce or knockout expression of target proteins, for example by disrupting the underlying gene encoding the protein. In several embodiments, gene editing can reduce expression of a target protein by about 30%, about 40%, about 50%, about 60%, about 70%, about 75%, about 80%, about 85%, about 90%, about 95%, about 97%, about 98%, about 99%, or more (including any amount between those listed). In several embodiments, the gene is completely knocked out, such that expression of the target protein is undetectable. In several embodiments, gene editing is used to “knock in” or otherwise enhance expression of a target protein. In several embodiments, expression of a target protein can be enhanced by about 30%, about 40%, about 50%, about 60%, about 70%, about 75%, about 80%, about 85%, about 90%, about 95%, about 97%, about 98%, about 99%, or more (including any amount between those listed). Unless indicated otherwise to the contrary, the sequences provided for guide RNAs that are recited using deoxyribonucleotides refer to the target DNA and shall be considered as also referencing those guides used in practice (e.g., employing ribonucleotides, where the ribonucleotide uracil is used in lieu of deoxyribonucleotide thymine or vice-versa where thymine is used in lieu of uracil, wherein both are complementary base pairs to adenine when reciting either an RNA or DNA sequence). For example, a gRNA with the sequence ATGCTCAATGCGTC (SEQ ID NO: 995) shall also refer to the following sequence AUGCUCAAUGCGUC (SEQ ID NO: 996) or a gRNA with sequence AUGCUCAAUGCGUC (SEQ ID NO: 996) shall also refer to the following sequence ATGCTCAATGCGTC (SEQ ID NO: 995).

[0268] By way of non-limiting example, TGF-beta is one such cytokine released by tumor cells that results in immune suppression within the tumor microenvironment. That immune suppression reduces the ability of immune cells, even engineered CAR-immune cells is some cases, to destroy the tumor cells, thus allowing for tumor progression. In several embodiments, as discussed in detail below, immune checkpoint inhibitors are disrupted through gene editing. In several embodiments, blockers of immune suppressing cytokines in the tumor microenvironment are used, including blockers of their release or competitive inhibitors that reduce the ability of the signaling molecule to bind and inhibit an immune cell. Such signaling molecules include, but are not limited to TGF-beta, IL10, arginase, inducible NOS, reactive-NOS, Arg1, Indoleamine 2,3-dioxygenase (IDO), and PGE₂. However, in additional embodiments, there are provided immune cells, such as NK cells, wherein the ability of the NK cell (or other cell) to respond to a given immunosuppressive signaling molecule is disrupted and/or eliminated. For example, in several embodiments, in several embodiments, NK cells or T cells are genetically edited to become have reduced sensitivity to TGF-beta. TGF-beta is an inhibitor of NK cell function on at least the levels of proliferation and cytotoxicity. See, for example, FIG. 8A which schematically shows some of the inhibitory pathways by which TGF-beta reduces NK cell activity and/or proliferation. Thus, according to some embodiments, the expression of the TGF-beta receptor is knocked down or knocked out through gene editing, such that the edited NK is resistant to the immunosuppressive effects of TGF-beta in the tumor microenvironment. In several embodiments, the TGFB2 receptor is knocked down or knocked out through gene editing, for example, by use of CRISPR-Cas editing. Small interfering RNA, antisense RNA, TALENs or zinc fingers are used in other embodiments. Other isoforms of the TGF-beta receptor (e.g., TGF-beta 1 and/or TGF-beta 3) are edited in some embodiments. In some embodiments TGF-beta receptors in T cells are knocked down through gene editing.

[0269] In accordance with additional embodiments, other modulators of one or more aspects of NK cell (or T cell) function are modulated through gene editing. A variety of cytokines impart either negative (as with TGF-beta above) or positive signals to immune cells. By way of non-limiting example, IL15 is a positive regulator of NK cells, which as disclosed herein, can enhance one or more of NK cell homing, NK cell migration, NK cell expansion/proliferation, NK cell cytotoxicity, and/or NK cell persistence. To keep NK cells in check under normal physiological circumstances, a cytokine-inducible SH2-containing protein (CIS, encoded by the CISH gene) acts as a critical negative regulator of IL-15 signaling in NK cells. As discussed herein, because IL 5 biology impacts multiple aspects of NK cell functionality, including, but not limited to, proliferation/expansion, activation, cytotoxicity, persistence, homing, migration, among others. Thus, according to several embodiments, editing CISH enhances the functionality of NK cells across multiple functionalities, leading to a more effective and long-lasting NK cell therapeutic. In several embodiments, inhibitors of CIS are used in conjunction with engineered NK cell administration. In several embodiments, the CIS expression is knocked down or knocked out through gene editing of the CISH gene, for example, by use of CRISPR-Cas editing. Small interfering RNA, antisense RNA, TALENs or zinc fingers are used in other embodiments. In some embodiments CIS expression in T cells is knocked down through gene editing.

[0270] In several embodiments, CISH gene editing endows an NK cell with enhanced ability to home to a target site. In several embodiments, CISH gene editing endows an NK cell with enhanced ability to migrate, e.g., within a tissue in response to, for example chemoattractants or away from repellants. In several embodiments, CISH gene editing endows an NK cell with enhanced ability to be activated, and thus exert, for example, anti-tumor effects. In several embodiments, CISH gene editing endows an NK cell with enhanced proliferative ability, which in several embodiments, allows for generation of robust NK cell numbers from a donor blood sample. In addition, in such embodiments, NK cells edited for CISH and engineered to express a CAR are more readily, robustly, and consistently expanded in culture. In several embodiments, CISH gene editing endows an NK cell with enhanced cytotoxicity. In several embodiments, the editing of CISH synergistically enhances the cytotoxic effects of engineered NK cells and/or engineered T cells that express a CAR.

[0271] In several embodiments, CISH gene editing activates or inhibits a wide variety of pathways. The CIS protein is a negative regulator of IL15 signaling by way of, for example, inhibiting JAK-STAT signaling pathways. These pathways would typically lead to transcription of IL15-responsive genes (including CISH). In several embodiments, knockdown of CISH disinhibits JAK-STAT (e.g., JAK1-STAT5) signaling and there is enhanced transcription of IL 5-responsive genes. In several embodiments, knockout of CISH yields enhanced signaling through mammalian target of rapamycin (mTOR), with corresponding increases in expression of genes related to cell metabolism and respiration. In several embodiments, knockout of CISH yields IL15 induced increased expression of IL-2Ra (CD25), but not IL-15Ra or IL-2/15RP, enhanced NK cell membrane binding of IL15 and/or IL2, increased phosphorylation of STAT-3 and/or STAT-5, and elevated expression of the antiapoptotic proteins, such as Bcl-2. In several embodiments, CISH knockout results in IL15-induced upregulation of selected genes related to mitochondrial functions (e.g., electron transport chain and cellular respiration) and cell cycle. Thus, in several embodiments, knockout of CISH by gene editing enhances the NK cell cytotoxicity and/or persistence, at least in part via metabolic reprogramming. In several embodiments, negative regulators of cellular metabolism, such as TXNIP, are downregulated in response to CISH knockout. In several embodiments, promotors for cell survival and proliferation including BIRC5 (Survivin), TOP2A, CKS2, and RACGAP1 are upregulated after CISH knockout, whereas antiproliferative or proapoptotic proteins such as TGFB1, ATM, and PTCH1 are downregulated. In several embodiments, CISH knockout alters the state (e.g., activates or inactivates) signaling via or through one or more of CXCL-10, IL2, TNF, IFNg, IL13, IL4, Jnk, PRF1, STAT5, PRKCQ, IL2 receptor Beta, SOCS2, MYD88, STAT3, STAT1, TBX21, LCK, JAK3, IL& receptor, ABL1, IL9, STAT5A, STAT5B, Tcf7, PRDM1, and/or EOMES.

[0272] In several embodiments, gene editing of the immune cells can also provide unexpected enhancement in the expansion, persistence and/or cytotoxicity of the edited immune cell. As disclosed herein, engineered cells (e.g., those expressing a CAR) may also be edited, the combination of which provides for a robust cell for immunotherapy. In several embodiments, the edits allow for unexpectedly improved NK cell expansion, persistence and/or cytotoxicity. In several embodiments, knockout of CISH expression in NK cells removes a potent negative regulator of I-15-mediated signaling in NK cells, disinhibits the NK cells and allows for one or more of enhanced NK cell homing, NK cell migration, activation of NK cells, expansion, cytotoxicity and/or persistence. Additionally, in several embodiments, the editing can enhance NK and/or T cell function in the otherwise suppressive tumor microenvironment. In several embodiments, CISH gene editing results in enhanced NK cell expansion, persistence and/or cytotoxicity without requiring Notch ligand being provided exogenously.

[0273] As discussed above, T cells that are engineered to express a CAR or chimeric receptor are employed in several embodiments. Also as mentioned above, T cells express a T Cell Receptor (TCR) on their surface. As disclosed herein, in several embodiments, autologous immune cells are transferred back into the original donor of the cells. In such embodiments, immune cells, such as NK cells or T cells are obtained from patients, expanded, genetically modified (e.g., with a CAR or chimeric receptor) and/or optionally further expanded and re-introduced into the patient. As disclosed herein, in several embodiments, allogeneic immune cells are transferred into a subject that is not the original donor of the cells. In such embodiments, immune cells, such as NK cells or T cells are obtained from a donor, expanded, genetically modified (e.g., with a CAR or chimeric receptor) and/or optionally further expanded and administered to the subject.

[0274] Allogeneic immunotherapy presents several hurdles to be overcome. In immune-competent hosts, the administered allogeneic cells are rapidly rejected, known as host versus graft rejection (HvG). This substantially limits the efficacy of the administered cells, particularly their persistence. In immune-incompetent hosts, allogeneic cells are able to engraft. However, if the administered cells comprise a T cell (several embodiments disclosed herein employ mixed populations of NK and T cells), the endogenous T cell receptor (TCR) specificities recognize the host tissue as foreign, resulting in graft versus host disease (GvHD). GvHD can lead to significant tissue damage in the host (cell recipient). Several embodiments disclosed herein address both of these hurdles, thereby allowing for effective and safe allogeneic immunotherapy. In several embodiments, gene edits can advantageously help to reduce and/or avoid graft vs. host disease (GvHD). A non-limiting embodiment of such an approach, using a mixed population of NK cell and T cells, is schematically illustrated in FIG. 8C, wherein the NK cells are engineered to express a CAR and the T cells are engineered to not only express a CAR, but also edited to render the T cells non-alloreactive. FIG. 8D schematically shows a mechanism by which graft v. host disease occurs. An allogeneic T cell and an allogeneic NK cell, both engineered to express a CAR that targets the tumor, are introduced into a host. However, the T cell still bears the native T-cell receptor (TCR). This TCR recognizes the HLA type of the host cell as “non-self” and can exert cytotoxicity against host cells. FIG. 8E shows a non-limiting embodiment of how graft v. host disease can be reduced or otherwise avoided through gene editing of the T cells. Briefly, as this approach is discussed in more detail below, gene editing can be performed in order to knockout the native TCR on T cells. Lacking a TCR, the allogeneic T cell cannot detect the “non-self” HLA of the host cells, and therefore is not triggered to exert cytotoxicity against host cells. Thus, in several embodiments T cells are subjected to gene editing to either reduce functionality of and/or reduce or eliminate expression of the native T cell. In several embodiments, CRISPR is used to knockout the TCR. These, and other, embodiments are discussed below.

[0275] T cell receptors (TCR) are cell surface receptors that participate in the activation of T cells in response to the presentation of an antigen. The TCR is made up of two different protein chains (it is a heterodimer). The majority of human T cells have TCRs that are made up of an alpha (α) chain and a beta (β) chain (encoded by separate genes). A small percentage of T cells have TCRs made up of gamma and delta (γ/δ) chains (the cells being known as gamma-delta T cells).

[0276] Rather than recognizing an intact antigen (as with immunoglobulins), T cells are activated by processed peptide fragments in association with an MHC molecule. This is known as MHC restriction. When the TCR recognizes disparities between the donor and recipient MHC, that recognition stimulates T cell proliferation and the potential development of GVHD. In some embodiments, the genes encoding either the TCRα, TCRβ, TCRγ, and/or the TCEδ are disrupted or otherwise modified to reduce the tendency of donor T cells to recognize disparities between donor and host MHC, thereby reducing recognition of alloantigen and GVHD.

[0277] T-cell mediated immunity involves a balance between co-stimulatory and inhibitory signals that serve to fine-tune the immune response. Inhibitory signals, also known as immune checkpoints, allow for avoidance of auto-immunity (e.g., self-tolerance) and also limit immune-mediated damage. Immune checkpoint protein expression are often altered by tumors, enhancing immune resistance in tumor cells and limiting immunotherapy efficacy. CTLA4 downregulates the amplitude of T cell activation. In contrast, PD1 limits T cell effector functions in peripheral tissue during an inflammatory response and also limits autoimmunity. Immune checkpoint blockade, in several embodiments, helps to overcome a barriers to activation of functional cellular immunity. In several embodiments, antagonistic antibodies specific for inhibitory ligands on T cells including Cytotoxic-T-lymphocyte-associated antigen 4 (CTLA-4; also known as CD152) and programmed cell death protein 1 (PD1 or PDCD1 also known as CD279) are used to enhance immunotherapy.

[0278] In several embodiments, there is provided genetically modified T cells that are non-alloreactive and highly active. In several embodiments, the T cells are further modified such that certain immune checkpoint genes are inactivated, and the immune checkpoint proteins are thus not expressed by the T cell. In several embodiments, this is done in the absence of manipulation or disruption of the CD3z signaling domain (e.g., the TCRs are still able initiate T cell signaling).

[0279] In several embodiments, genetic inactivation of TCRalpha and/or TCRbeta coupled with inactivation of immune checkpoint genes in T lymphocytes derived from an allogeneic donor significantly reduces the risk of GVHD. In several embodiments, this is done by eliminating at least a portion of one or more of the substituent protein chains (alpha, beta, gamma, and/or delta) responsible for recognition of MHC disparities between donor and recipient cells. In several embodiments, this is done while still allowing for T cell proliferation and activity.

[0280] In some embodiments wherein allogeneic cells are administered, the receiving subject may receive some other adjunct treatment to support or otherwise enhance the function of the administered immune cells. In several embodiments, the subject may be pre-conditioned (e.g., with radiation or chemotherapy). In some embodiments, the adjunct treatment comprises administration of lymphocyte growth factors (such as IL-2).

[0281] Moreover, in several embodiments, editing can improve persistence of administered cells (whether NK cells, T cells, or otherwise) for example, by masking cells to the host immune response. In some cases, a recipient's immune cells will attack donor cells, especially from an allogeneic donor, known as Host vs. Graft disease (HvG). FIG. 8F shows a schematic representation of HvG, where the host T cells, with a native/functional TCR identify HLA on donor T and/or donor NK cells as non-self. In such cases, the host T-cell TCR binding to allogeneic cell HLA leads to elimination of allogeneic cells, thus reducing the persistence of the donor engineered NK/T cells. Regarding HvG, to prevent rejection of administered allogeneic T cells, the subject receiving the cells requires suppression of their immune system In several embodiments, glucocorticoids are used, and include, but are not limited to beclomethasone, betamethasone, budesonide, cortisone, dexamethasone, hydrocortisone, methylprednisolone, prednisolone, prednisone, triamcinolone, among others. Activation of the glucocorticoid receptor in recipient's own T cells alters expression of genes involved in the immune response and results in reduced levels of cytokine production, which translates to T cell anergy and interference with T cell activation (in the recipient). Other embodiments relate to administration of antibodies that can deplete certain types of the recipients immune cells. One such target is CD52, which is expressed at high levels on T and B lymphocytes and lower levels on monocytes while being absent on granulocytes and bone marrow precursors. Treatment or pre-treatment of the recipient with Alemtuzumab, a humanized monoclonal antibody directed against CD52, has been shown to induce a rapid depletion of circulating lymphocytes and monocytes, thus lessening the probability of HvG, given the reduction in recipient immune cells. Immunosuppressive drugs may limit the efficacy of administered allogeneic engineered T cells. Therefore, as disclosed herein, several embodiments relate to genetically engineered allogeneic donor cells that are resistant to immunosuppressive treatment. In several embodiments, as discussed in more detail below, immune cells, such as NK cells and/or T cells are edited (in addition to being engineered to express a CAR) to extend their persistence by avoiding cytotoxic responses from host immune cells. In several embodiments, gene editing to remove one or more HLA molecules from the allogeneic NK and/or T cells reduce elimination by host T-cells. In several embodiments, the allogeneic NK and/or T cells are edited to knock out one or more of beta-2 microglobulin (an HLA Class I molecule) and CIITA (an HLA Class II molecule). FIG. 8G schematically depicts this approach.

[0282] In some embodiments of mixed allogeneic cell therapy, the populations of engineered cells actually target one another, for example when the therapeutic cells are edited to remove HLA molecules in order to avoid HvG. Such editing of, for example CAR T cells can result in the vulnerability of the edited allogeneic CAR T cells to cytotoxic attack by the CAR NK cells as well as elimination by host NK cells. This is caused by the missing “self” inhibitory signals generally presented by KIR molecules. FIG. 8H schematically depicts this process. In several embodiments, gene editing can be used to knock in expression of one or more “masking” molecules which mask the allogeneic cells from the host immune system and from fratricide by other administered engineered cells. FIG. 8I schematically depicts this approach. In several embodiments, proteins can be expressed on the surface of the allogeneic cells to inhibit targeting by NKs (both engineered NKs and host NKs), which advantageously prolongs persistence of both allogeneic CAR-Ts and CAR-NKs. In several embodiments, gene editing is used to knock in CD47, expression of which effectively functions as a “don't eat me” signal. In several embodiments, gene editing is used to knock in expression of HLA-E. HLA-E binds to both the inhibiting and activating receptors NKG2A and NKG2C, respectively that exist on the surface of NK cells. However, NKG2A is expressed to a greater degree in most human NK cells, thus, in several embodiments, expression of HLA-E on engineered cells results in an inhibitory effect of NK cells (both host and donor) against such cells edited to (or naturally expressing) HLA-E. In addition, in several embodiments, one or more viral HLA homologs are knocked in such that they are expressed by the engineered NK and/or T cells, thus conferring on the cells the ability of viruses to evade the host immune system. In several embodiments, these approaches advantageously prolong persistence of both allogeneic CAR-Ts and CAR-NKs.

[0283] In several embodiments, genetic editing (whether knock out or knock in) of any of the target genes (e.g., CISH, TGFBR, TCR, B2M, CIISH, CD47, HLA-E, or any other target gene disclosed herein), is accomplished through targeted introduction of DNA breakage, and subsequent DNA repair mechanism. In several embodiments, double strand breaks of DNA are repaired by non-homologous end joining (NHEJ), wherein enzymes are used to directly join the DNA ends to one another to repair the break. In several embodiments, however, double strand breaks are repaired by homology directed repair (HDR), which is advantageously more accurate, thereby allowing sequence specific breaks and repair. HDR uses a homologous sequence as a template for regeneration of missing DNA sequences at the break point, such as a vector with the desired genetic elements (e.g., an insertion element to disrupt the coding sequence of a TCR) within a sequence that is homologous to the flanking sequences of a double strand break. This will result in the desired change (e.g., insertion) being inserted at the site of the DSB.

[0284] In several embodiments, gene editing is accomplished by one or more of a variety of engineered nucleases. In several embodiments, restriction enzymes are used, particularly when double strand breaks are desired at multiple regions. In several embodiments, a bioengineered nuclease is used. Depending on the embodiment, one or more of a Zinc Finger Nuclease (ZFN), transcription-activator like effector nuclease (TALEN), meganuclease and/or clustered regularly interspaced short palindromic repeats (CRISPR/Cas9) system are used to specifically edit the genes encoding one or more of the TCR subunits.

[0285] Meganucleases are characterized by their capacity to recognize and cut large DNA sequences (from 14 to 40 base pairs). In several embodiments, a meganuclease from the LAGLIDADG family is used, and is subjected to mutagenesis and screening to generate a meganuclease variant that recognizes a unique sequence(s), such as a specific site in the TCR, or CISH, or any other target gene disclosed herein. Target sites in the TCR can readily be identified. Further information of target sites within a region of the TCR can be found in US Patent Publication No. 2018/0325955, and US Patent Publication No. 2015/0017136, each of which is incorporated by reference herein in its entirety. In several embodiments, two or more meganucleases, or functions fragments thereof, are fused to create a hybrid enzymes that recognize a desired target sequence within the target gene (e.g., CISH).

[0286] In contrast to meganucleases, ZFNs and TALEN function based on a non-specific DNA cutting catalytic domain which is linked to specific DNA sequence recognizing peptides such as zinc fingers or transcription activator-like effectors (TALEs). Advantageously, the ZFNs and TALENs thus allow sequence-independent cleavage of DNA, with a high degree of sequence-specificity in target recognition. Zinc finger motifs naturally function in transcription factors to recognize specific DNA sequences for transcription. The C-terminal part of each finger is responsible for the specific recognition of the DNA sequence. While the sequences recognized by ZFNs are relatively short, (e.g., ˜3 base pairs), in several embodiments, combinations of 2, 3, 4, 5, 6, 7, 8, 9, 10 or more zinc fingers whose recognition sites have been characterized are used, thereby allowing targeting of specific sequences, such as a portion of the TCR (or an immune checkpoint inhibitor). The combined ZFNs are then fused with the catalytic domain(s) of an endonuclease, such as Fokl (optionally a Fokl heterodimer), in order to induce a targeted DNA break. Additional information on uses of ZFNs to edit the TCR and/or immune checkpoint inhibitors can be found in U.S. Pat. No. 9,597,357, which is incorporated by reference herein.

[0287] Transcription activator-like effector nucleases (TALENs) are specific DNA-binding proteins that feature an array of 33 or 34-amino acid repeats. Like ZFNs, TALENs are a fusion of a DNA cutting domain of a nuclease to TALE domains, which allow for sequence-independent introduction of double stranded DNA breaks with highly precise target site recognition. TALENs can create double strand breaks at the target site that can be repaired by error-prone non-homologous end-joining (NHEJ), resulting in gene disruptions through the introduction of small insertions or deletions. Advantageously, TALENs are used in several embodiments, at least in part due to their higher specificity in DNA binding, reduced off-target effects, and ease in construction of the DNA-binding domain.

[0288] CRISPRs (Clustered Regularly Interspaced Short Palindromic Repeats) are genetic elements that bacteria use as protection against viruses. The repeats are short sequences that originate from viral genomes and have been incorporated into the bacterial genome. Cas (CRISPR associated proteins) process these sequences and cut matching viral DNA sequences. By introducing plasmids containing Cas genes and specifically constructed CRISPRs into eukaryotic cells, the eukaryotic genome can be cut at any desired position. Additional information on CRISPR can be found in US Patent Publication No. 2014/0068797, which is incorporated by reference herein. In several embodiments, CRISPR is used to manipulate the gene(s) encoding a target gene to be knocked out or knocked in, for example CISH, TGFBR2, TCR, B2M, CIITA, CD47, HLA-E, etc. In several embodiments, CRISPR is used to edit one or more of the TCRs of a T cell and/or the genes encoding one or more immune checkpoint inhibitors. In several embodiments, the immune checkpoint inhibitor is selected from one or more of CTLA4 and PD1. In several embodiments, CRISPR is used to truncate one or more of TCRα, TCRβ, TCRγ, and TCRδ. In several embodiments, a TCR is truncated without impacting the function of the CD3z signaling domain of the TCR. Depending on the embodiment and which target gene is to be edited, a Class 1 or Class 2 Cas is used. In several embodiments, a Class 1 Cas is used and the Cas type is selected from the following types: I, IA, IB, IC, ID, IE, IF, IU, III, IIIA, IIIB, IIIC, lID, IV IVA, IVB, and combinations thereof. In several embodiments, the Cas is selected from the group consisting of Cas3, Cas8a, Cas5, Cas8b, Cas8c, Cas10d, Cse1, Cse2, Csy1, Csy2, Csy3, GSU0054, Cas10, Csm2, Cmr5, Cas10, Csx11, Csx10, Csf1, and combinations thereof. In several embodiments, a Class 2 Cas is used and the Cas type is selected from the following types: II, IIA, IIB, IIC, V, VI, and combinations thereof. In several embodiments, the Cas is selected from the group consisting of Cas9, Csn2, Cas4, Cpf1, C2c1, C2c3, Cas13a (previously known as C2c2), Cas13b, Cas13c, CasX, CasY and combinations thereof. In some embodiments, class 2 CasX is used, wherein CasX is capable of forming a complex with a guide nucleic acid and wherein the complex can bind to a target DNA, and wherein the target DNA comprises a non-target strand and a target strand. In some embodiments, class 2 CasY is used, wherein CasY is capable of binding and modifying a target nucleic acid and/or a polypeptide associated with target nucleic acid.

[0289] In several embodiments, as discussed above, editing of CISH advantageously imparts to the edited cells, particularly edited NK cells, enhanced expansion, cytotoxicity and/or persistence. Additionally, in several embodiments, the modification of the TCR comprises a modification to TCRα, but without impacting the signaling through the CD3 complex, allowing for T cell proliferation. In one embodiment, the TCRα is inactivated by expression of pre-Ta in the cells, thus restoring a functional CD3 complex in the absence of a functional alpha/beta TCR. As disclosed herein, the non-alloreactive modified T cells are also engineered to express a CAR to redirect the non-alloreactive T cells specificity towards tumor marker, but independent of MHC. Combinations of editing are used in several embodiments, such as knockout of the TCR and CISH in combination, or knock out of CISH and knock in of CD47, by way of non-limiting examples.

[0290] In several embodiments, the expression of ADORA2A (Adenosine 2a Receptor) is reduced and/or eliminated in order to increase overall activation in resultant T cells and/or NK cells, or other cell type provided for herein. In several embodiments, ADORA2A is disrupted and/or knocked out using one or more of the gene editing methods disclosed herein. In several embodiments, ADORA2A is disrupted and/or knocked out using a Crispr-Cas mediated approach (e.g., Cas9) as disclosed elsewhere herein, with the Cas nuclease guided by the use of one more of the following ADORA2A-specific guide RNAs: SEQ ID NO: 503-506. In several embodiments, gene editing can reduce expression of a target protein by about 30%, about 40%, about 50%, about 60%, about 70%, about 75%, about 80%, about 85%, about 90%, about 95%, about 97%, about 98%, about 99%, or more (including any amount between those listed). Loss of expression of ADORA2A induces decreased sensitivity to adenosine, a well-established immunosuppressant for T cells and NK cells. Thus, according to several embodiments, gene editing ADORA2A increases the cytotoxicity, persistence, immune avoidance or otherwise enhances the efficacy of engineered NK, T, or other cell as disclosed herein.

[0291] In several embodiments, the expression of TGFBR2 is reduced and/or eliminated in order to increase overall activation in resultant T cells and/or NK cells, or other cell type provided for herein. In several embodiments, TGFBR2 is disrupted and/or knocked out using one or more of the gene editing methods disclosed herein. In several embodiments, TGFBR2 is disrupted and/or knocked out using a Crispr-Cas mediated approach (e.g., Cas9) as disclosed elsewhere herein, with the Cas nuclease guided by the use of one more of the following TGFBR2-specific guide RNAs: SEQ ID NO: 544-547. In several embodiments, gene editing can reduce expression of a target protein by about 30%, about 40%, about 50%, about 60%, about 70%, about 75%, about 80%, about 85%, about 90%, about 95%, about 97%, about 98%, about 99%, or more (including any amount between those listed). In NK cells, TGFBR2 is a potent checkpoint in NK cell-mediated tumor immunity, while for T cells, knockout of TGFBR2 rescues car T cell exhaustion induced by TGF-β1. Thus, according to several embodiments, gene editing TGFBR2 increases the cytotoxicity, persistence, immune avoidance or otherwise enhances the efficacy of engineered NK, T, or other cell as disclosed herein.

[0292] In several embodiments, the expression of NKG2A is reduced and/or eliminated in order to increase overall activation in resultant T cells and/or NK cells, or other cell type provided for herein. In several embodiments, NKG2A is disrupted and/or knocked out using one or more of the gene editing methods disclosed herein. In several embodiments, NKG2A is disrupted and/or knocked out using a Crispr-Cas mediated approach (e.g., Cas9) as disclosed elsewhere herein, with the Cas nuclease guided by the use of one more of the following NKG2A-specific guide RNAs: SEQ ID NO: 548-551. In several embodiments, gene editing can reduce expression of a target protein by about 30%, about 40%, about 50%, about 60%, about 70%, about 75%, about 80%, about 85%, about 90%, about 95%, about 97%, about 98%, about 99%, or more (including any amount between those listed). NKG2A binds to HLA-E and is recognized as an MHC-recognizing receptor. Since NKG2A is an inhibitor receptor, loss of expression of NKG2A induces increased activation of constituent cells. In NK and T cells, loss of NKG2A leads to increased activation and cytotoxicity against HLA-E expressing tumor cells. Thus, according to several embodiments, gene editing NKG2A increases the cytotoxicity, persistence, immune avoidance or otherwise enhances the efficacy of engineered NK, T, or other cell as disclosed herein.

[0293] In several embodiments, the expression of Cytokine Signaling 2 (SOCS2) is reduced and/or eliminated in order to increase overall activation in resultant T cells and/or NK cells, or other cell type provided for herein. In several embodiments, SOCS2 is disrupted and/or knocked out using one or more of the gene editing methods disclosed herein. In several embodiments, SOCS2 is disrupted and/or knocked out using a Crispr-Cas mediated approach (e.g., Cas9) as disclosed elsewhere herein, with the Cas nuclease guided by the use of one more of the following SOCS2-specific guide RNAs: SEQ ID NO: 556-561. In several embodiments, gene editing can reduce expression of a target protein by about 30%, about 40%, about 50%, about 60%, about 70%, about 75%, about 80%, about 85%, about 90%, about 95%, about 97%, about 98%, about 99%, or more (including any amount between those listed). SOCS proteins are negative regulators of cytokine responses, and SOCS2 specifically negatively regulates the development of NK cells through inhibiting JAK2 activity. Loss of expression of SOCS2 in NK cells induces increased NK cell development and overall cytotoxicity. Thus, according to several embodiments, gene editing SOCS2 increases the cytotoxicity, persistence, immune avoidance or otherwise enhances the efficacy of engineered NK, T, or other cell as disclosed herein.

[0294] In several embodiments, the expression of Casitas B-lineage lymphoma-b (Cbl-b) is reduced and/or eliminated in order to increase overall activation in resultant T cells and/or NK cells, or other cell type provided for herein. In several embodiments, Cbl-b is disrupted and/or knocked out using one or more of the gene editing methods disclosed herein. In several embodiments, Cbl-b is disrupted and/or knocked out using a Crispr-Cas mediated approach (e.g., Cas9) as disclosed elsewhere herein, with the Cas nuclease guided by the use of one more of the following Cbl-b-specific guide RNAs: In several embodiments, the expression of Casitas B-lineage lymphoma-b (Cbl-b) is reduced and/or eliminated in order to increase overall activation in resultant T cells and NK cells. In several embodiments, Cbl-b is disrupted and/or knocked out using a Crispr-Cas mediated approach (e.g., Cas9) as disclosed elsewhere herein, but with the use of one more of the following Cbl-b-specific guide RNAs: SEQ ID NO: 552-555. In several embodiments, gene editing can reduce expression of a target protein by about 30%, about 40%, about 50%, about 60%, about 70%, about 75%, about 80%, about 85%, about 90%, about 95%, about 97%, about 98%, about 99%, or more (including any amount between those listed). Cbl-b is an E3 ubiquitin ligase that negatively regulates T cell activation Loss of expression of Cbl-b in NK cells and T cells demonstrate increased antitumor immunity. Moreover, Cbl-b deficient T cells and NK cells are resistant to PD-L1/PD-1 mediated suppression. Thus, according to several embodiments, gene editing Cbl-b increases the cytotoxicity, persistence, immune avoidance or otherwise enhances the efficacy of engineered NK, T, or other cell as disclosed herein.

[0295] In several embodiments, the expression of Beta-2 Microglobulin (B2-microglobulin) is reduced and/or eliminated in order to increase overall activation in resultant T cells and/or NK cells, or other cell type provided for herein. In several embodiments, B2-microglobulin is disrupted and/or knocked out using one or more of the gene editing methods disclosed herein. In several embodiments, B2-microglobulin is disrupted and/or knocked out using a Crispr-Cas mediated approach (e.g., Cas9) as disclosed elsewhere herein, with the Cas nuclease guided by the use of one more of the following B2-microglobulin-specific guide RNAs: SEQ ID NO: 290-299. In several embodiments, gene editing can reduce expression of a target protein by about 30%, about 40%, about 50%, about 60%, about 70%, about 75%, about 80%, about 85%, about 90%, about 95%, about 97%, about 98%, about 99%, or more (including any amount between those listed). Loss of expression of B2-microglobulin induces greatly reduced levels of MHC class I molecules, and in both NK cells and T cells, reduction of B2-microglobulin can modulate overall cell recognition of autologous and allogenic cells. Thus, according to several embodiments, gene editing B2-microglobulin increases the cytotoxicity, persistence, immune avoidance or otherwise enhances the efficacy of engineered NK, T, or other cell as disclosed herein.

[0296] In several embodiments, the expression of T cell immunoreceptor with Ig and ITIM domains (TIGIT) is reduced and/or eliminated in order to increase overall activation in resultant T cells and/or NK cells, or other cell type provided for herein. In several embodiments, TIGIT is disrupted and/or knocked out using one or more of the gene editing methods disclosed herein. In several embodiments, TIGIT is disrupted and/or knocked out using a Crispr-Cas mediated approach (e.g., Cas9) as disclosed elsewhere herein, with the Cas nuclease guided by the use of one more of the following TIGIT-specific guide RNAs: SEQ ID NO: 507-510. In several embodiments, gene editing can reduce expression of a target protein by about 30%, about 40%, about 50%, about 60%, about 70%, about 75%, about 80%, about 85%, about 90%, about 95%, about 97%, about 98%, about 99%, or more (including any amount between those listed). TIGIT is a checkpoint receptor associated with T cell and NK cell exhaustion. Loss of expression of TIGIT in NK cells prevents NK cell exhaustion and promotes NK cell-dependent tumor immunity. Loss of expression of TIGIT in T cells can similarly lead to downstream activation of resultant T cells. Thus, according to several embodiments, gene editing TIGIT increases the cytotoxicity, persistence, immune avoidance or otherwise enhances the efficacy of engineered NK, T, or other cell as disclosed herein.

[0297] In several embodiments, the expression of Programmed cell death protein-1 (PD-1) is reduced and/or eliminated in order to increase overall activation in resultant T cells and/or NK cells, or other cell type provided for herein. In several embodiments, PD-1 is disrupted and/or knocked out using one or more of the gene editing methods disclosed herein. In several embodiments, PD-1 is disrupted and/or knocked out using a Crispr-Cas mediated approach (e.g., Cas9) as disclosed elsewhere herein, with the Cas nuclease guided by the use of one more of the following PD-1-specific guide RNAs: SEQ ID NO: 511-514. In several embodiments, gene editing can reduce expression of a target protein by about 30%, about 40%, about 50%, about 60%, about 70%, about 75%, about 80%, about 85%, about 90%, about 95%, about 97%, about 98%, about 99%, or more (including any amount between those listed). PD-1 plays an inhibitory role in immune regulation and down-regulates overall function by suppressing immune cell activity. Loss of expression of PD-1 in NK cells increases overall cytotoxicity due to increased secretion of interferon-gamma, granzyme B, and perforin. Similarly, T cells with loss of expression of PD-1 demonstrate increased cytotoxicity and overall caspase activation. Thus, according to several embodiments, gene editing PD-1 increases the cytotoxicity, persistence, immune avoidance or otherwise enhances the efficacy of engineered NK, T, or other cell as disclosed herein.

[0298] In several embodiments, the expression of T-cell immunoglobulin and mucin-domain containing-3 (TIM-3) is reduced and/or eliminated in order to increase overall activation in resultant T cells and/or NK cells, or other cell type provided for herein. In several embodiments, TIM-3 is disrupted and/or knocked out using one or more of the gene editing methods disclosed herein. In several embodiments, TIM-3 is disrupted and/or knocked out using a Crispr-Cas mediated approach (e.g., Cas9) as disclosed elsewhere herein, with the Cas nuclease guided by the use of one more of the following TIM-3-specific guide RNAs: SEQ ID NO:515-518. In several embodiments, gene editing can reduce expression of a target protein by about 30%, about 40%, about 50%, about 60%, about 70%, about 75%, about 80%, about 85%, about 90%, about 95%, about 97%, about 98%, about 99%, or more (including any amount between those listed). TIM-3 is an inhibitory receptor involved in immune checkpoint function. Loss of expression of TIM-3 increases overall cytotoxicity in engineered NK and T cells as well as decreased exhaustion of NK cells and T cells, leading to increased effector function of constituent cells lacking TIM-3 expression. Thus, according to several embodiments, gene editing TIM-3 increases the cytotoxicity, persistence, immune avoidance or otherwise enhances the efficacy of engineered NK, T, or other cell as disclosed herein.

[0299] In several embodiments, the expression of CD38 is reduced and/or eliminated in order to increase overall activation in resultant T cells and/or NK cells, or other cell type provided for herein. In several embodiments, CD38 is disrupted and/or knocked out using one or more of the gene editing methods disclosed herein. In several embodiments, CD38 is disrupted and/or knocked out using a Crispr-Cas mediated approach (e.g., Cas9) as disclosed elsewhere herein, with the Cas nuclease guided by the use of one more of the following CD38-specific guide RNAs: SEQ ID NO:519-522. In several embodiments, gene editing can reduce expression of a target protein by about 30%, about 40%, about 50%, about 60%, about 70%, about 75%, about 80%, about 85%, about 90%, about 95%, about 97%, about 98%, about 99%, or more (including any amount between those listed). CD38 plays a role in the maturation cycle of immune cells, and blood cancers can often present upregulated CD38. Loss of CD38 expression on constituent NK cells allows for greater cytotoxicity due to decreased fratricide. Wild-type NK cells self-express CD38, leading to downstream self-targeting effects in wild-type NK cells. For T cells, loss of CD38 expression for constituent T cells leads to increased cytotoxicity. Thus, according to several embodiments, gene editing CD38 increases the cytotoxicity, persistence, immune avoidance or otherwise enhances the efficacy of engineered NK, T, or other cell as disclosed herein.

[0300] In several embodiments, the expression of T cell receptor alpha (TCR a) is reduced and/or eliminated in order to increase overall activation in resultant T cells and/or NK cells, or other cell type provided for herein. In several embodiments, TCR a is disrupted and/or knocked out using one or more of the gene editing methods disclosed herein. In several embodiments, TCR a is disrupted and/or knocked out using a Crispr-Cas mediated approach (e.g., Cas9) as disclosed elsewhere herein, with the Cas nuclease guided by the use of one more of the following TCR a-specific guide RNAs: SEQ ID NO:566-569.

[0301] In several embodiments, gene editing can reduce expression of a target protein by about 30%, about 40%, about 50%, about 60%, about 70%, about 75%, about 80%, about 85%, about 90%, about 95%, about 97%, about 98%, about 99%, or more (including any amount between those listed). T cell receptors (TCR) are protein complexes found on T cells responsible for recognizing MHC molecules. Loss of certain TCRs and preferential expression of other TCRs can lead to increased cytotoxicity in engineered cells due to increased selective targeting and recognition by constituent cells. Thus, according to several embodiments, gene editing TCRs increases the cytotoxicity, persistence, immune avoidance or otherwise enhances the efficacy of engineered NK, T, or other cell as disclosed herein.

[0302] In several embodiments, the expression of CISH is reduced and/or eliminated in order to increase overall activation in resultant T cells and/or NK cells, or other cell type provided for herein. In several embodiments, CISH is disrupted and/or knocked out using one or more of the gene editing methods disclosed herein. In several embodiments, CISH is disrupted and/or knocked out using a Crispr-Cas mediated approach (e.g., Cas9) as disclosed elsewhere herein, with the Cas nuclease guided by the use of one more of the following CISH-specific guide RNAs: SEQ ID NO: 562-565, or other guide disclosed herein. In several embodiments, gene editing can reduce expression of a target protein by about 30%, about 40%, about 50%, about 60%, about 70%, about 75%, about 80%, about 85%, about 90%, about 95%, about 97%, about 98%, about 99%, or more (including any amount between those listed). In CD8+ T cells, CISH actively silences TCR signaling to maintain tumor tolerance, and CISH has been shown to be a downstream negative regulator of IL-15 receptor signaling. In NK and T cells, CISH plays a role in checkpoint maturation and proliferation. Thus, according to several embodiments, gene editing CISH increases the cytotoxicity, persistence, immune avoidance or otherwise enhances the efficacy of engineered NK, T, or other cell as disclosed herein.

[0303] In several embodiments, the expression of CEACAMI is reduced and/or eliminated in order to increase overall activation in resultant T cells and/or NK cells, or other cell type provided for herein. In several embodiments, CEACAMI is disrupted and/or knocked out using one or more of the gene editing methods disclosed herein. In several embodiments, CEACAMI is disrupted and/or knocked out using a Crispr-Cas mediated approach (e.g., Cas9) as disclosed elsewhere herein, with the Cas nuclease guided by the use of one more of the following CEACAMI-specific guide RNAs: SEQ ID NO: 497-499. In several embodiments, gene editing can reduce expression of a target protein by about 30%, about 40%, about 50%, about 60%, about 70%, about 75%, about 80%, about 85%, about 90%, about 95%, about 97%, about 98%, about 99%, or more (including any amount between those listed). CEACAMI is a checkpoint inhibitor for both NK and T cells and can inhibit lysis of CEACAMI-bearing tumor cell lines. Loss of expression of CEACAMI can increase overall cytotoxicity for NK and T cells. Thus, according to several embodiments, gene editing CEACAMI increases the cytotoxicity, persistence, immune avoidance or otherwise enhances the efficacy of engineered NK, T, or other cell as disclosed herein.

[0304] In several embodiments, the expression of DDIT4 is reduced and/or eliminated in order to increase overall activation in resultant T cells and/or NK cells, or other cell type provided for herein. In several embodiments, DDIT4 is disrupted and/or knocked out using one or more of the gene editing methods disclosed herein. In several embodiments, DDIT4 is disrupted and/or knocked out using a Crispr-Cas mediated approach (e.g., Cas9) as disclosed elsewhere herein, with the Cas nuclease guided by the use of one more of the following DDIT4-specific guide RNAs: SEQ ID NO: 500-502. In several embodiments, gene editing can reduce expression of a target protein by about 30%, about 40%, about 50%, about 60%, about 70%, about 75%, about 80%, about 85%, about 90%, about 95%, about 97%, about 98%, about 99%, or more (including any amount between those listed). In NK and T cells, DDIT4 is a negative regulator of mTORC1, which itself enhances IL-15 mediated survival and proliferation of NK cells. Moreover, DDIT4 is upregulated by oxidative stress conditions as is common in tumor microenvironments. Loss of DDIT4 function in engineered cells may increase overall glucose metabolism leading to enhanced proliferation, as well as increasing overall NK or T cell cytotoxicity. Thus, according to several embodiments, gene editing DDIT4 increases the cytotoxicity, persistence, immune avoidance or otherwise enhances the efficacy of engineered NK, T, or other cell as disclosed herein.

[0305] In several embodiments, the expression of MAPKAP Kinase 3 (MAPKAPK3) is reduced and/or eliminated in order to increase overall activation in resultant T cells and/or NK cells, or other cell type provided for herein. In several embodiments, MAPKAPK3 is disrupted and/or knocked out using one or more of the gene editing methods disclosed herein. In several embodiments, MAPKAPK3 is disrupted and/or knocked out using a Crispr-Cas mediated approach (e.g., Cas9) as disclosed elsewhere herein, with the Cas nuclease guided by the use of one more of the following MAPKAPK3-specific guide RNAs: SEQ ID NO: 494-496. In several embodiments, gene editing can reduce expression of a target protein by about 30%, about 40%, about 50%, about 60%, about 70%, about 75%, about 80%, about 85%, about 90%, about 95%, about 97%, about 98%, about 99%, or more (including any amount between those listed). MAPKAP Kinase 3 in expressed in both NK and T cells. Loss of MAPKAPK3 in engineered cells is expected to increase cytotoxicity, cytokine secretion, and overall NK signaling. Thus, according to several embodiments, gene editing MAPKAPK3 increases the cytotoxicity, persistence, immune avoidance or otherwise enhances the efficacy of engineered NK, T, or other cell as disclosed herein.

[0306] In several embodiments, the expression of SMAD3 is reduced and/or eliminated in order to increase overall activation in resultant T cells and/or NK cells, or other cell type provided for herein. In several embodiments, SMAD3 is disrupted and/or knocked out using one or more of the gene editing methods disclosed herein. In several embodiments, SMAD3 is disrupted and/or knocked out using a Crispr-Cas mediated approach (e.g., Cas9) as disclosed elsewhere herein, with the Cas nuclease guided by the use of one more of the following SMAD3-specific guide RNAs: SEQ ID NO: 491-493. In several embodiments, gene editing can reduce expression of a target protein by about 30%, about 40%, about 50%, about 60%, about 70%, about 75%, about 80%, about 85%, about 90%, about 95%, about 97%, about 98%, about 99%, or more (including any amount between those listed). SMAD3 is a downstream mediator of TGF-Beta and Activin A signaling. Inhibition of activin A provides an effective downstream TGFBR knockout. Smad3 silenced NK cells demonstrate increased proliferation and differentiation, as well as increased cytotoxicity in engineered T and NK cells. Thus, according to several embodiments, gene editing SMAD3 increases the cytotoxicity, persistence, immune avoidance or otherwise enhances the efficacy of engineered NK, T, or other cell as disclosed herein.

[0307] As discussed above, genetically edited cells can be edited at a plurality of locations. For example in several embodiments, cells (e.g., NK cells or T cells, or a mixture thereof) are edited at two locations. In several embodiments, one of the gene edits is made at a target site in the CISH gene. In several embodiments, one of the gene edits is made at a target site in the CBLB gene. In several embodiments, one of the gene edits is made at a target site in the TGFBR2 gene. In several embodiments, one of the gene edits is made at a target site in the TIGIT gene. Any combination of such edits is also within the provided embodiments, for example dual TGFBR2/CBLB, dual TIGIT/TGFBR2, CISH/CBLB, CISH/TGFBR2, CISH/TIGIT, etc. Moreover, any combination of edits of any of the target genes for editing (e.g., by Crispr or other nuclease) can be made according to some embodiments. Additionally, to the extent necessary to achieve a desired amount of reduction in gene expression, multiple edits may be made within a single target gene, or genes.

[0308] In several embodiments, gene edits are made at a target site in a CISH gene and a target site in a CBLB gene. In some embodiments, a double edit, e.g., CISH/CBLB is made in NK cells and/or T cells for use in therapy. In several embodiments, a combination CISH/CBLB gene edit is made in an NK cell that does not include an edit at a CD70 gene. In several embodiments, a combination CISH/CBLB gene edit is made in an NK cell that does not include an edit at any additional gene. In several embodiments, a combination CISH/CBLB gene edit is made in an NK cell that does not express any one or combination of any of an anti-CD70 CAR, an anti-CD19 CAR, or an anti-NKG2D chimeric receptor. In some embodiments, a triple edit, e.g., CD70/CISH/CBLB is made in NK cells and/or T cells for use in therapy. In some embodiments, a triple edit, e.g., CD70/CISH/CBLB is made in NK cells and/or T cells that are engineered to express a tumor-targeting CAR.

[0309] In several embodiments, gene edits are made at a target site in a CISH gene and a target site in a TGFBR2 gene. In some embodiments, a double edit, e.g., CISH/TGFBR2 is made in NK cells and/or T cells for use in therapy. In several embodiments, a combination CISH/TGFBR2 gene edit is made in an NK cell that does not include an edit at a CD70 gene. In several embodiments, a combination CISH/TGFBR2 gene edit is made in an NK cell that does not include an edit at any additional gene. In several embodiments, a combination CISH/TGFBR2 gene edit is made in an NK cell that does not express any one or combination of any of an anti-CD70 CAR, an anti-CD19 CAR, or an anti-NKG2D chimeric receptor. In some embodiments, a triple edit, e.g., CD70/CISH/TGFBR2 is made in NK cells and/or T cells for use in therapy. In some embodiments, a triple edit, e.g., CD70/CISH/TGFBR2 is made in NK cells and/or T cells that are engineered to express a tumor-targeting CAR.

[0310] In several embodiments, gene edits are made at a target site in a CISH gene and a target site in a TIGIT gene. In some embodiments, a double edit, e.g., CISH/TIGIT is made in NK cells and/or T cells for use in therapy. In several embodiments, a combination CISH/TIGIT gene edit is made in an NK cell that does not include an edit at a CD70 gene. In several embodiments, a combination CISH/TIGIT gene edit is made in an NK cell that does not include an edit at any additional gene. In several embodiments, a combination CISH/TIGIT gene edit is made in an NK cell that does not express any one or combination of any of an anti-CD70 CAR, an anti-CD19 CAR, or an anti-NKG2D chimeric receptor. In some embodiments, a triple edit, e.g., CD70/CISH/TIGIT is made in NK cells and/or T cells for use in therapy. In some embodiments, a triple edit, e.g., CD70/CISH/TIGIT is made in NK cells and/or T cells that are engineered to express a tumor-targeting CAR.

### Engineering Enhanced Persistence Through Immunosuppressive Effector

[0311] Additional cellular engineering strategies are provided for herein that serve to further enhance the persistence of allogeneic cellular therapy products, such as allogeneic CAR-T cells and/or allogeneic CAR-NK cells. As discussed herein, there are various strategies that can be employed to reduce the tendency of an allogeneic cell therapy product to induce host cell-mediated graft rejection. For example, in several embodiments the expression of B2M is reduced and/or eliminated in order to reduce the host-mediated graft rejection. In several embodiments, B2M expression is disrupted and/or knocked out using a Crispr-Cas mediated approach (e.g., Cas9) as disclosed elsewhere herein, but with the use of one more of the following B2M-specific guide RNAs: SEQ ID NO: 290—CGCGAGCACAGCTAAGGCCA; SEQ ID NO: 291—GAGTAGCGCGAGCACAGCTA; SEQ ID NO: 292—GCTACTCTCTCTTTCTGGCC; SEQ ID 293—GGCCGAGATGTCTCGCTCCG; SEQ ID NO: 294—GGCCACGGAGCGAGACATCT; SEQ ID NO: 295—CACAGCCCAAGATAGTTAAG; SEQ ID NO: 296—AGTCACATGGTTCACACGGC; SEQ ID NO: 297—AAGTCAACTTCAATGTCGGA; SEQ ID NO: 298—ACTTGTCTTTCAGCAAGGAC; and SEQ ID NO: 299—TGGGCTGTGACAAAGTCACA. Loss of expression of B2M induces a complete loss of HLA expression, which can reduce, and in some embodiments, eliminate, the host T-cell mediated graft rejection. However, this can make also render the administered cells susceptible to host NK-cell mediated graft rejection (as well as to administered engineered NK cells, when a mixed NK/T cell population is used). This, as discussed above, results in loss of the KIR inhibitory signals (e.g., “missing self” signals). See FIGS. 8E-8I. In some embodiments various proteins can be expressed on the surface of a cell to be administered to an allogeneic recipient in order to inhibit host (or administered) NK cells from targeting the administered NK and or T cells. In several embodiments, approaches involve the expression of, for example HLA-E/HLA-G expression, CD47, or one or more viral peptide/proteins, and combinations of these (among other disclosed herein).

### Viral Immunosuppressive Peptides

[0312] Many viral infections occur, at least in part, due to the ability of a virus to evade an host immune system, either by camouflage or suppression of host immune reactivity. In vitro studies have shown that particular aspects of certain viruses have such immunosuppressive effects, for example, retroviral transmembrane envelope proteins, such as the p15E protein. Additionally, studies have identified conserved regions of sequences across multiple viral types, see for example Table 1, which includes, among others, a 17 amino acid conserved sequence, CKS-17 (SEQ ID NO: 199), and the nucleic acid encoding the same (SEQ ID NO: 216).

TABLE 1
Viral Peptides

| SEQ ID | | |
|---|---|---|
| NO: | Name | Sequence |
| 199 | CKS-17 | LQNRRGLDLLFLKEGGL |
| 200 | MoLV p15E | LQNRRGLDLLFLKEGGLCAALKEECCF |
| 201 | FLC p15E | LQNRRGLDLLFLKEGGLCAALKEECCF |
| 202 | AKV p15E | LQNRRGLDLLFLKEGGLCAALKEECCF |
| 203 | GLV p15E | LQNRRGLDLLFLKEGGLCAALKEECCF |
| 204 | MMCF p15E | LQNRRGLDLLFLKEGGLCAALKEECCF |
| 205 | AMCF p15E | LQNRRGLDLLFLKEGGLCAALKEECCF |
| 206 | FeLV p15E | LQNRRGLDLLFLQEGGLCAALKEECCF |
| 207 | MPMV gp20 | LQNRRGLDLLTAEQGGICLALQEKCCF |
| 208 | REV-A GP20 | LQNRRGLDLLTAEQGGICLALQEKCCF |
| 209 | HTLV-I gp21 | AQNRRGLDLLFWEQGGLCKALQEQCRF |
| 210 | HTLV-II gp21 | AQNRRGLDLLFWEQGGLCKAIQEQCCF |
| 211 | HIV-1 NEF | MTYKAAVDLSHFLKEKGGL |
| 212 | HIV-1 gp41 | LQARVLAVERYLKDQQL |
| 213 | B26 | LQNKRGLDLLFLX₁X₂GGL |
| | | (X₁ = K/E, X₂ = E/K) |
| 214 | BaEV | LQNRRGLDLLTAEQGGX₁ |
| | | (X₁ = L/I) |
| 215 | ERV-9, 4-1 | X₁QNRX₂X₃LX₄X₅X₆X₇AX₈X₉X₁₀GX₁₁ |
| | | (X₁ = L/Y, X₂ = */L, X₃ = G/A, X₄ = D/N, X₅ = L/Y, |
| | | X₆ = L/S, X₇ = L/T, X₈ = E/Q/A, X₉ = E/K, X₁₀ = G/E, |
| | | X₁₁ = L/V |
| 216 | CKS-17 | ctgcaaaacagaaggggattagacctgctttttcttaaagagggagggctc |

[0313] In several embodiments, one or more of such viral immunosuppressive peptides (also referred to as viral peptides) are used to confer resistance to inactivation of engineered immune cells by host NK cells. Various approaches can be undertaken depending on the embodiment and the cell type to be used.

[0314] According to several embodiments, one or more viral immunosuppressive peptides are integrated into a chimeric antigen receptor that is then expressed by a population of immune cells to be used in treating a patient. In several embodiments, the immune cells are allogeneic to the patient. In several embodiments, a combination of NK cells and T are engineered to express one or more CARs that comprise one or more viral immunosuppressive peptide. FIG. 25A depicts a non-limiting embodiment of a viral immunosuppressive peptide that is incorporated into a CAR (identified generically as “Immunosuppressive effector Domain”, which shall be understood to refer to any of the viral immunosuppressive peptides or other immunosuppressive peptides/proteins disclosed herein, unless otherwise specified. Shown in FIG. 25A, the viral immunosuppressive peptide is integrated into the hinge/spacer domain of a CAR comprising a target binder (such as an scFv), a hinge (also referred to herein as a spacer), a transmembrane domain and one or more intracellular signaling domains. Depending on the embodiment, more than one (e.g., two, three, four, five, or more) viral immunosuppressive peptides can be introduced into the hinge/spacer region of the CAR. In several such embodiments, as schematically depicted in FIG. 25B, when two (or more) viral immunosuppressive peptides are used, they can be of a different sequence or type. For example, in several embodiments, a CKS-17 peptide is integrated into the hinge region of the CAR in conjunction with, for example, a REV-A peptide. In several embodiments, the inclusion of two or more viral immunosuppressive peptides creates a synergistic immunosuppressive effect.

[0315] Depending on the embodiment, the length of the hinge/spacer region can be altered. In several embodiments, a CD8alpha hinge/spacer region is use, but, in some embodiments, a longer or a shorter spacer is used. The spacer can be, depending on the embodiment, an IgG1, IgG2, IgG3, IgG4, or CD28 spacer domain or be derived from IgG1, IgG2, IgG3, IgG4, CD28, or can be a fully synthetic sequence. In several embodiments, IgG-based spacers are edited to reduce or eliminate the ability of the spacer to bring Fc-receptor bearing cells, which can advantageously reduce off-target activation of immune cells (such as those bearing the immunosuppressive effectors as disclosed herein). Non-limiting editing approaches include, but are not limited to, deletion of the heavy chain constant 2 (CH2) domain to abrogate binding to the Fc receptor, or mutating certain amino acids that are essential to Fc receptor binding. In several embodiments, a longer spacer advantageously allows for enhances targeting of certain membrane-proximal epitopes expressed by cancer cells and exposure of the immunosuppressive effector such that it can interact with host and/or administered immune cells to reduce unwanted suppression of the therapeutic cells. In several embodiments, a single hinge region can be made longer by including multiple hinge-encoding sequences, e.g., two, three, four, or more hinges. In several embodiments, wherein multiple hinge regions are used, they can be of the same type (e.g., three CD8α hinges) or can vary (e.g., one CD8αhinge, one CD28 hinge, and a IgG1 hinge). In several embodiments, a shorter hinge is used, wherein the shorter hinge limits the ability of host phosphatases (like CD45) to attenuate signaling of a CAR expressed by the engineered immune cell. In several embodiments, the hinge region comprises one or more of SEQ ID NOs: 479-487. In some embodiments, the hinge region comprises an amino acid sequence with at least about 80%, at least about 85%, at least about 90%, at least about 94%, at least about 95%, at least about 96%, at least about 97%, at least about 98%, or at least about 99%, sequence identity, homology and/or functional equivalence with any of SEQ ID NOs: 479-487.

[0316] FIG. 25C depicts an additional approach according to several embodiments disclosed herein, namely the engineering of the viral immunosuppressive peptide into the linker between the heavy chain and the light chain of an scFv. in additional embodiments, where a target binder that is not an scFv (e.g., a full antibody), the viral immunosuppressive peptide can be integrated into any region of that binder that allows for exposure of the vial immunosuppressive peptide as well as maintenance of target binding capability. As with integration into the hinge region, engineering the viral immunosuppressive peptide into the linker region can be done with a single peptide, or with multiple peptides. An additional approach is shown in FIG. 25D, with the viral immunosuppressive peptide engineered into the N-terminal region of the chimeric antigen receptor. As with the other approaches, in several embodiments multiple viral immunosuppressive peptides can be used. Additionally, combinations of these positions within the CAR can be used. For example, a viral immunosuppressive peptide (or more than one) can be positioned in the hinge region in combination with, for example a viral immunosuppressive peptide (or more than one) positioned in the linker region of an scFv and/or at the N-terminus of the CAR. In several embodiments, the positions allow the viral immunosuppressive peptides to be exposed such that they can interact with, and thus suppress, host immune cell activity that would otherwise reduce the efficacy of the engineered immune cell expressing the CAR.

[0317] In several embodiments, the engineered CAR comprises one or more copies of one or more of the following amino acid or DNA sequences: SEQ ID NO: 199-216, 220-221, 225-226, 230-231, 235-236, 240-241, 245-246, 250-251, 273-274, 278, 280, 288, or 289. As discussed above, those sequences (or individual sequence) can be positioned in the hinge region, the N-terminal region or within the target binder region (e.g., within the linker of an scFv). In several embodiments, the CAR comprises an amino acid sequence or DNA sequence with at least about 80%, at least about 85%, at least about 90%, at least about 94%, at least about 95%, at least about 96%, at least about 97%, at least about 98%, or at least about 99%, sequence identity, homology and/or functional equivalence with any of SEQ ID NOs: SEQ ID NO: 199-216, 220-221, 225-226, 230-231, 235-236, 240-241, 245-246, 250-251, 273-274, 278, 280, 288, or 289.

[0318] In several embodiments, the engineered cells provided for herein comprise a chimeric receptor that targets NKG2D, wherein the CAR comprises an amino acid of SEQ ID NO: 174 or 899, or comprises an amino acid sequence with at least about 80%, at least about 85%, at least about 90%, at least about 94%, at least about 95%, at least about 96%, at least about 97%, at least about 98%, or at least about 99%, sequence identity, homology and/or functional equivalence to SEQ ID NO: 174 or 899 with one or more copies of one or more of the following viral immunosuppressive amino acid sequences: SEQ ID NO: 199-216, 220, 225, 230, 235, 240, 245, 250, 273, 280, 288, or 289 integrated into the sequence of SEQ ID NO: 174 or 899. In addition to, or in place of the integrated viral immunosuppressive amino acids, the CAR optionally comprises an amino acid of SEQ ID NO: 174 or 899, or comprises an amino acid sequence with at least about 80%, at least about 85%, at least about 90%, at least about 94%, at least about 95%, at least about 96%, at least about 97%, at least about 98%, or at least about 99%, sequence identity, homology and/or functional equivalence to SEQ ID NO: 174 or 899, with one or more of the viral immunosuppressive sequences expressed on the cell in a membrane-bound format, as discussed below.

[0319] In several embodiments, the engineered cells provided for herein comprise a CAR that targets CD19, wherein the CAR comprises an amino acid of SEQ ID NO: 178 or 901, or comprises an amino acid sequence with at least about 80%, at least about 85%, at least about 90%, at least about 94%, at least about 95%, at least about 96%, at least about 97%, at least about 98%, or at least about 99%, sequence identity, homology and/or functional equivalence to SEQ ID NO: 178 or 901 with one or more copies of one or more of the following viral immunosuppressive amino acid sequences: SEQ ID NO: 199-216, 220, 225, 230, 235, 240, 245, 250, 273, 280, 288, or 289 integrated into the sequence of SEQ ID NO: 178. In addition to, or in place of the integrated viral immunosuppressive amino acid, the CAR optionally comprises an amino acid of SEQ ID NO: 178 or 901, or comprises an amino acid sequence with at least about 80%, at least about 85%, at least about 90%, at least about 94%, at least about 95%, at least about 96%, at least about 97%, at least about 98%, or at least about 99%, sequence identity, homology and/or functional equivalence to SEQ ID NO: 178 or 901, with one or more of the viral immunosuppressive sequences expressed on the cell in a membrane-bound format, as discussed below.

[0320] In several embodiments, the engineered cells provided for herein comprise a CAR that targets CD19, wherein the CAR is encoded by a nucleic acid sequence comprising SEQ ID NO: 466, or comprises an nucleic acid sequence with at least about 80%, at least about 85%, at least about 90%, at least about 94%, at least about 95%, at least about 96%, at least about 97%, at least about 98%, or at least about 99%, sequence identity, homology and/or functional equivalence to SEQ ID NO: 466 with one or more copies of one or more of the following viral immunosuppressive amino acid sequences: SEQ ID NO: 199-216, 220, 225, 230, 235, 240, 245, 250, 273, 280, 288, or 289 integrated into the sequence encoded by SEQ ID NO: 466. In addition to, or in place of the integrated viral immunosuppressive amino acids, the CAR optionally comprises a CAR encoded by SEQ ID NO: 466, or comprises an amino acid sequence with at least about 80%, at least about 85%, at least about 90%, at least about 94%, at least about 95%, at least about 96%, at least about 97%, at least about 98%, or at least about 99%, sequence identity, homology and/or functional equivalence to the sequence encoded by SEQ ID NO: 466, with one or more of the viral immunosuppressive sequences expressed on the cell in a membrane-bound format, as discussed below.

[0321] In several embodiments, the engineered cells provided for herein comprise a CAR that targets CD70, wherein the CAR comprises an amino acid of any of SEQ ID NOs: 383-465 or 912-994, or comprises an amino acid sequence with at least about 80%, at least about 85%, at least about 90%, at least about 94%, at least about 95%, at least about 96%, at least about 97%, at least about 98%, or at least about 99%, sequence identity, homology and/or functional equivalence to any of SEQ ID NO: 383-465 or 912-994 with one or more copies of one or more of the following viral immunosuppressive amino acid sequences: SEQ ID NO: 199-216, 220, 225, 230, 235, 240, 245, 250, 273, 280, 288, or 289 integrated into the sequence of any of SEQ ID NO: 383-465 or 912-994. In addition to, or in place of the integrated viral immunosuppressive amino acid, the CAR optionally comprises an amino acid of any of SEQ ID NO: 383-465 or 912-994, or comprises an amino acid sequence with at least about 80%, at least about 85%, at least about 90%, at least about 94%, at least about 95%, at least about 96%, at least about 97%, at least about 98%, or at least about 99%, sequence identity, homology and/or functional equivalence to SEQ ID NO: 383-465 or 912-994, with one or more of the viral immunosuppressive sequences expressed on the cell in a membrane-bound format, as discussed below.

[0322] In addition to incorporation of the viral immunosuppressive peptides being positioned in the CAR, the peptides can be coupled to a domain that allows them to be expressed as a membrane bound viral immunosuppressive peptide.

[0323] FIGS. 26A-26J show non-limiting schematic depictions of embodiments disclosed herein. FIG. 26A shows a single viral immunosuppressive peptide coupled to a transmembrane protein. FIG. 26B shows two individual viral immunosuppressive peptides, each coupled to a transmembrane protein. FIG. 26C shows a plurality of viral immunosuppressive peptides in a membrane-bound format. As shown, and described herein, both the viral immunosuppressive peptide and the transmembrane domain can vary, or can be the same. In other words, provided for herein are combinations such as viral immunosuppressive peptide (VIP) 1: transmembrane protein (TM) 1; VIP2:TM1; VIP2:TM2; VIPI:TM2; VIP3:TM1; VIPI:TM3, and the like, including VIPX:TMY.

[0324] FIG. 26D shows an additional non-limiting embodiment wherein multiple viral immunosuppressive peptides are coupled to a single transmembrane protein, with the viral immunosuppressive peptides being the same. FIG. 26E shows an additional non-limiting embodiment with wherein multiple viral immunosuppressive peptides are coupled to a single transmembrane protein, with the viral immunosuppressive peptides being distinct from one another. FIG. 26F shows a further non-limiting embodiment wherein multiple membrane-bound constructs are expressed on a single immune cell, one coupled to a single viral immunosuppressive peptide, and the other coupled to multiple viral immunosuppressive peptide. While not illustrated, it shall be appreciated that the transmembrane domains may differ from one another when multiple constructs are expressed by an individual cell.

[0325] Various transmembrane proteins can be used, such as one or more of CD8α, CD4, CD3ε, CD3γ, CD3δ, CD3ζ, CD28, CD137, glycophorin A, glycophorin D, nicotinic acetylcholine receptor, a GABA receptor, FcεRIγ, and a T-cell receptor. In several embodiments, a portion of one or more of these domains (e.g., a transmembrane domain) is used to anchor or otherwise tether the viral immunosuppressive peptide(s) to the immune cell surface. In several embodiments, the transmembrane protein comprises a CD8α transmembrane domain. In several embodiments, the CD8α transmembrane domain comprises the amino acid sequence of SEQ ID NO: 4, or a sequence with at least about 80%, at least about 85%, about 90%, about 95%, about 96%, about 97%, about 98% or about 99% sequence identity with SEQ ID NO: 4. In several embodiments, the CD8α transmembrane domain is encoded by the nucleic acid sequence of SEQ ID NO: 3, or a sequence with at least about 80%, at least about 85%, about 90%, about 95%, about 96%, about 97%, about 98% or about 99% sequence identity with SEQ ID NO: 3. In several embodiments, a hinge or other linker is used to couple the viral immunosuppressive peptide to the transmembrane protein. In several embodiments, a CD8α is used. In several embodiments, the CD8α hinge comprises the amino acid sequence of SEQ ID NO: 2, or a sequence with at least about 80%, at least about 85%, about 90%, about 95%, about 96%, about 97%, about 98% or about 99% sequence identity with SEQ ID NO: 2. In several embodiments, the CD8α hinge comprises the amino acid sequence of SEQ ID NO: 1, or a sequence with at least about 80%, at least about 85%, about 90%, about 95%, about 96%, about 97%, about 98% or about 99% sequence identity with SEQ ID NO: 1.

[0326] FIG. 26G shows an additional schematic of a non-limiting embodiment provided for herein. This embodiment comprises an immune cell engineered to express a CAR as well as a membrane-bound viral immunosuppressive peptide. FIG. 27G shows a non-limiting embodiment wherein the immune cell expresses a CAR along with a plurality of viral immunosuppressive peptides coupled to a transmembrane domain. Also provided for are immune cells (e.g., NK cells, T cells or combinations there) expressing a CAR and multiple membrane bound viral immunosuppressive peptides (e.g., as in FIG. 26F). In several embodiments, the CAR comprises one or more viral immunosuppressive peptides, while some embodiments involve expression of a CAR without a viral immunosuppressive peptide. As shown in these schematic figures, the immune cells engineered, in several embodiments, are allogeneic cells. In several embodiments, allogeneic NK cells are used. In several embodiments, allogeneic T cells are used. In several embodiments, combinations (e.g., a mixed population) of allogeneic NK cell and allogeneic T cells are used.

[0327] In several embodiments, there is provided a polynucleotide encoding a synthetic CKS-17 viral immunosuppressive peptide. In several embodiments, the polynucleotide encodes an amino acid sequence comprising SEQ ID NO: 199. In several embodiments, the polynucleotide encodes a sequence that shares at least about 80%, at least about 85%, at least about 90%, at least about 94%, at least about 95%, at least about 96%, at least about 97%, at least about 98%, or at least about 99%, sequence identity, homology and/or functional equivalence with SEQ ID NO: 199. In several embodiments, the polynucleotide comprises SEQ ID NO: 216 or shares at least about 80%, at least about 85%, at least about 90%, at least about 94%, at least about 95%, at least about 96%, at least about 97%, at least about 98%, or at least about 99%, sequence identity with SEQ ID NO: 216. In several embodiments, provided for is a membrane-bound synthetic CKS-17 viral immunosuppressive peptide. In several embodiments, the synthetic CKS-17 viral immunosuppressive peptide is coupled to a CD8α transmembrane protein and/or CD8α hinge domain. In several embodiments, the membrane-bound synthetic CKS-17 viral immunosuppressive peptide construct comprises one or more linker sequences. In several embodiments, the membrane-bound synthetic CKS-17 viral immunosuppressive peptide comprises a CD8α signal peptide, synthetic CKS-17, a CD8α hinge, and a CD8α transmembrane domain. In several embodiments, the membrane-bound synthetic CKS-17 viral immunosuppressive peptide construct is encoded by a polynucleotide that encodes an amino acid sequence comprising SEQ ID NO: 218 or SEQ ID NO: 693. In several embodiments, the polynucleotide encodes a sequence that shares at least about 80%, at least about 85%, at least about 90%, at least about 94%, at least about 95%, at least about 96%, at least about 97%, at least about 98%, or at least about 99%, sequence identity, homology and/or functional equivalence with SEQ ID NO: 218 or SEQ ID NO: 693. In several embodiments, the polynucleotide comprises SEQ ID NO: 219 (or SEQ ID NO: 694) or shares at least about 80%, at least about 85%, at least about 90%, at least about 94%, at least about 95%, at least about 96%, at least about 97%, at least about 98%, or at least about 99%, sequence identity with SEQ ID NO: 219 (or SEQ ID NO: 694). Optionally, the polynucleotide encodes a detectable tag (e.g., a FLAG tag) and/or can comprise an internal ribosome entry site (IRES) that allows for expression of an additional protein, such as a detectable tag (e.g., GFP). In several embodiments, the polynucleotide encoding membrane-bound synthetic CKS-17 and GFP comprises SEQ ID NO: 217 or shares at least about 80%, at least about 85%, at least about 90%, at least about 94%, at least about 95%, at least about 96%, at least about 97%, at least about 98%, or at least about 99%, sequence identity with SEQ ID NO: 217. In several embodiments, the polynucleotide encoding membrane-bound synthetic CKS-17, a FLAG tag, and GFP comprises SEQ ID NO: 692 or shares at least about 80%, at least about 85%, at least about 90%, at least about 94%, at least about 95%, at least about 96%, at least about 97%, at least about 98%, or at least about 99%, sequence identity with SEQ ID NO: 692. In several embodiments, the polynucleotide encoding membrane-bound synthetic CKS-17, a FLAG tag, and GFP encodes the amino acid sequence of SEQ ID NO: 691 or an amino acid sequence that shares at least about 80%, at least about 85%, at least about 90%, at least about 94%, at least about 95%, at least about 96%, at least about 97%, at least about 98%, or at least about 99%, sequence identity with SEQ ID NO: 691.

[0328] In several embodiments, there is provided a polynucleotide encoding a p15E viral immunosuppressive peptide. In several embodiments, the polynucleotide encodes an amino acid sequence comprising SEQ ID NO: 220. In several embodiments, the polynucleotide encodes a sequence that shares at least about 80%, at least about 85%, at least about 90%, at least about 94%, at least about 95%, at least about 96%, at least about 97%, at least about 98%, or at least about 99%, sequence identity, homology and/or functional equivalence with SEQ ID NO: 220. In several embodiments, the polynucleotide comprises SEQ ID NO: 221 or shares at least about 80%, at least about 85%, at least about 90%, at least about 94%, at least about 95%, at least about 96%, at least about 97%, at least about 98%, or at least about 99%, sequence identity with SEQ ID NO: 221. In several embodiments, provided for is a membrane-bound p15E viral immunosuppressive peptide. In several embodiments, the p15E viral immunosuppressive peptide is coupled to a CD8α transmembrane protein and/or CD8α hinge domain. In several embodiments, the membrane-bound p15E viral immunosuppressive peptide construct comprises one or more linker sequences. In several embodiments, the membrane-bound p15E viral immunosuppressive peptide comprises a CD8α signal peptide, p15E, a CD8α hinge, and a CD8α transmembrane domain. In several embodiments, the membrane-bound p15E viral immunosuppressive peptide construct is encoded by a polynucleotide that encodes an amino acid sequence comprising SEQ ID NO: 223 (or SEQ ID NO: 697). In several embodiments, the polynucleotide encodes a sequence that shares at least about 90%, at least about 94%, at least about 95%, at least about 96%, at least about 97%, at least about 98%, or at least about 99%, sequence identity, homology and/or functional equivalence with SEQ ID NO: 223 (or SEQ ID NO: 697). In several embodiments, the polynucleotide comprises SEQ ID NO: 224 (or SEQ ID NO: 698) or shares at least about 80%, at least about 85%, at least about 90%, at least about 94%, at least about 95%, at least about 96%, at least about 97%, at least about 98%, or at least about 99%, sequence identity with SEQ ID NO: 224 (or SEQ ID NO: 698). Optionally, the polynucleotide encodes a detectable tag (e.g., a FLAG tag) and/or can comprise an internal ribosome entry site (IRES) that allows for expression of an additional protein, such as a detectable tag (e.g., GFP). In several embodiments, the polynucleotide encoding mbp15E and GFP comprises SEQ ID NO: 222 or shares at least about 80%, at least about 85%, at least about 90%, at least about 94%, at least about 95%, at least about 96%, at least about 97%, at least about 98%, or at least about 99%, sequence identity with SEQ ID NO: 222. In several embodiments, the polynucleotide encoding mbp15E, a FLAG tag, and GFP comprises SEQ ID NO: 696 or shares at least about 80%, at least about 85%, at least about 90%, at least about 94%, at least about 95%, at least about 96%, at least about 97%, at least about 98%, or at least about 99%, sequence identity with SEQ ID NO: 696. In several embodiments, the membrane-bound p15E viral immunosuppressive peptide construct including GFP and a FLAG tag is encoded by a polynucleotide that encodes an amino acid sequence comprising SEQ ID NO: 695). In several embodiments, the polynucleotide encodes a sequence that shares at least about 90%, at least about 94%, at least about 95%, at least about 96%, at least about 97%, at least about 98%, or at least about 99%, sequence identity, homology and/or functional equivalence with SEQ ID NO: 695).

[0329] In several embodiments, there is provided a polynucleotide encoding a HTLV viral immunosuppressive peptide. In several embodiments, the polynucleotide encodes an amino acid sequence comprising SEQ ID NO: 225. In several embodiments, the polynucleotide encodes a sequence that shares at least about 80%, at least about 85%, at least about 90%, at least about 94%, at least about 95%, at least about 96%, at least about 97%, at least about 98%, or at least about 99%, sequence identity, homology and/or functional equivalence with SEQ ID NO: 225. In several embodiments, the polynucleotide comprises SEQ ID NO: 226 or shares at least about 80%, at least about 85%, at least about 90%, at least about 94%, at least about 95%, at least about 96%, at least about 97%, at least about 98%, or at least about 99%, sequence identity with SEQ ID NO: 226. In several embodiments, provided for is a membrane-bound HTLV viral immunosuppressive peptide. In several embodiments, the HTLV viral immunosuppressive peptide is coupled to a CD8α transmembrane protein and/or CD8α hinge domain. In several embodiments, the membrane-bound HTLV viral immunosuppressive peptide construct comprises one or more linker sequences. In several embodiments, the membrane-bound HTLV viral immunosuppressive peptide comprises a CD8α signal peptide, HTLV-1 (Gp21), a CD8α hinge, a and a CD8α transmembrane domain. In several embodiments, the membrane-bound HTLV viral immunosuppressive peptide construct is encoded by a polynucleotide that encodes an amino acid sequence comprising SEQ ID NO: 228 (or SEQ ID NO: 701). In several embodiments, the polynucleotide encodes an amino acid sequence that shares at least about 80%, at least about 85%, at least about 90%, at least about 94%, at least about 95%, at least about 96%, at least about 97%, at least about 98%, or at least about 99%, sequence identity, homology and/or functional equivalence with SEQ ID NO: 228 (or SEQ ID NO: 701). In several embodiments, the polynucleotide comprises SEQ ID NO: 229 (or SEQ ID NO: 702) or shares at least about 90%, at least about 94%, at least about 95%, at least about 96%, at least about 97%, at least about 98%, or at least about 99%, sequence identity with SEQ ID NO: 229 (or SEQ ID NO: 702). Optionally, the polynucleotide encodes a detectable tag (e.g., a FLAG tag) and/or can comprise an internal ribosome entry site (IRES) that allows for expression of an additional protein, such as a detectable tag (e.g., GFP). In several embodiments, the polynucleotide encoding membrane-bound HTLV and GFP comprises SEQ ID NO: 227 or shares at least about 80%, at least about 85%, at least about 90%, at least about 94%, at least about 95%, at least about 96%, at least about 97%, at least about 98%, or at least about 99%, sequence identity with SEQ ID NO: 227. In several embodiments, the polynucleotide encoding membrane-bound HTLV, a FLAG tag, and GFP comprises SEQ ID NO: 700 or shares at least about 80%, at least about 85%, at least about 90%, at least about 94%, at least about 95%, at least about 96%, at least about 97%, at least about 98%, or at least about 99%, sequence identity with SEQ ID NO: 700. In several embodiments, the membrane-bound HTLV, FLAG tag, GFP construct comprises the amino acid sequence of SEQ ID NO: 699 or shares at least about 80%, at least about 85%, at least about 90%, at least about 94%, at least about 95%, at least about 96%, at least about 97%, at least about 98%, or at least about 99%, sequence identity with SEQ ID NO: 699.

[0330] In several embodiments, there is provided a polynucleotide encoding a modified HIV Gp41 viral immunosuppressive peptide. In several embodiments, the polynucleotide encodes an amino acid sequence comprising SEQ ID NO: 230. In several embodiments, the polynucleotide encodes a sequence that shares at least about 80%, at least about 85%, at least about 90%, at least about 94%, at least about 95%, at least about 96%, at least about 97%, at least about 98%, or at least about 99%, sequence identity, homology and/or functional equivalence with SEQ ID NO: 230. In several embodiments, the polynucleotide comprises SEQ ID NO: 231 or shares at least about 80%, at least about 85%, at least about 90%, at least about 94%, at least about 95%, at least about 96%, at least about 97%, at least about 98%, or at least about 99%, sequence identity with SEQ ID NO: 231. In several embodiments, provided for is a membrane-bound modified HIV Gp41viral immunosuppressive peptide. In several embodiments, the modified HIV Gp41 viral immunosuppressive peptide is coupled to a CD8α transmembrane protein and/or CD8α hinge domain. In several embodiments, the membrane-bound modified HIV Gp41 viral immunosuppressive peptide construct comprises one or more linker sequences. In several embodiments, the membrane-bound modified HIV Gp41 viral immunosuppressive peptide comprises a CD8α signal peptide, modified HIV Gp41, a CD8α hinge, a and a CD8α transmembrane domain. In several embodiments, the membrane-bound modified HIV Gp41 viral immunosuppressive peptide construct is encoded by a polynucleotide that encodes an amino acid sequence comprising SEQ ID NO: 233 (or SEQ ID NO: 705). In several embodiments, the polynucleotide encodes a sequence that shares at least about 90%, at least about 94%, at least about 95%, at least about 96%, at least about 97%, at least about 98%, or at least about 99%, sequence identity, homology and/or functional equivalence with SEQ ID NO: 233 (or SEQ ID NO: 705). In several embodiments, the polynucleotide comprises SEQ ID NO: 234 (or SEQ ID NO: 706) or shares at least about 80%, at least about 85%, at least about 90%, at least about 94%, at least about 95%, at least about 96%, at least about 97%, at least about 98%, or at least about 99%, sequence identity with SEQ ID NO: 234 (or SEQ ID NO: 706). Optionally, the polynucleotide encodes a detectable tag (e.g., a FLAG tag) and/or can comprise an internal ribosome entry site (IRES) that allows for expression of an additional protein, such as a detectable tag (e.g., GFP). In several embodiments, the polynucleotide encoding membrane-bound modified HIV Gp41 and GFP comprises SEQ ID NO: 232 or shares at least about 80%, at least about 85%, at least about 90%, at least about 94%, at least about 95%, at least about 96%, at least about 97%, at least about 98%, or at least about 99%, sequence identity with SEQ ID NO: 232. In several embodiments, the polynucleotide encoding membrane-bound modified HIV Gp41, a FLAG tag, and GFP comprises SEQ ID NO: 704 or shares at least about 80%, at least about 85%, at least about 90%, at least about 94%, at least about 95%, at least about 96%, at least about 97%, at least about 98%, or at least about 99%, sequence identity with SEQ ID NO: 704. In several embodiments, the membrane-bound modified HIV Gp41, FLAG tag, GFP construct comprises the amino acid sequence of SEQ ID NO: 703 or an amino acid that shares at least about 80%, at least about 85%, at least about 90%, at least about 94%, at least about 95%, at least about 96%, at least about 97%, at least about 98%, or at least about 99%, sequence identity with SEQ ID NO: 703.

[0331] In several embodiments, there is provided a polynucleotide encoding a truncated HIV Gp41 viral immunosuppressive peptide. In several embodiments, the polynucleotide encodes an amino acid sequence comprising SEQ ID NO: 235. In several embodiments, the polynucleotide encodes a sequence that shares at least about 80%, at least about 85%, at least about 90%, at least about 94%, at least about 95%, at least about 96%, at least about 97%, at least about 98%, or at least about 99%, sequence identity, homology and/or functional equivalence with SEQ ID NO: 235. In several embodiments, the polynucleotide comprises SEQ ID NO: 236 or shares at least about 80%, at least about 85%, at least about 90%, at least about 94%, at least about 95%, at least about 96%, at least about 97%, at least about 98%, or at least about 99%, sequence identity with SEQ ID NO: 236. In several embodiments, provided for is a membrane-bound HIV Gp41 viral immunosuppressive peptide. In several embodiments, the HIV Gp41 viral immunosuppressive peptide is coupled to a CD8α transmembrane protein and/or CD8α hinge domain. In several embodiments, the membrane-bound HIV Gp41 viral immunosuppressive peptide construct comprises one or more linker sequences. In several embodiments, the membrane-bound HIV Gp41 viral immunosuppressive peptide comprises a CD8α signal peptide, HIV Gp41, a CD8α hinge, a and a CD8αtransmembrane domain. In several embodiments, the membrane-bound HIV Gp41 viral immunosuppressive peptide construct is encoded by a polynucleotide that encodes an amino acid sequence comprising SEQ ID NO: 238 (or SEQ ID NO: 709). In several embodiments, the polynucleotide encodes a sequence that shares at least about 80%, at least about 85%, at least about 90%, at least about 94%, at least about 95%, at least about 96%, at least about 97%, at least about 98%, or at least about 99%, sequence identity, homology and/or functional equivalence with SEQ ID NO: 238 (or SEQ ID NO: 709). In several embodiments, the polynucleotide comprises SEQ ID NO: 239 (or SEQ ID NO: 710) or shares at least about 80%, at least about 85%, at least about 90%, at least about 94%, at least about 95%, at least about 96%, at least about 97%, at least about 98%, or at least about 99%, sequence identity with SEQ ID NO: 239 (or SEQ ID NO: 710). Optionally, the polynucleotide encodes a detectable tag (e.g., a FLAG tag) and/or can comprise an internal ribosome entry site (IRES) that allows for expression of an additional protein, such as a detectable tag (e.g., GFP). In several embodiments, the polynucleotide encoding membrane-bound HIV Gp41 and GFP comprises SEQ ID NO: 237 or shares at least about 80%, at least about 85%, at least about 90%, at least about 94%, at least about 95%, at least about 96%, at least about 97%, at least about 98%, or at least about 99%, sequence identity with SEQ ID NO: 237. In several embodiments, the polynucleotide encoding membrane-bound HIV Gp41, a FLAG tag, and GFP comprises SEQ ID NO: 708 or shares at least about 80%, at least about 85%, at least about 90%, at least about 94%, at least about 95%, at least about 96%, at least about 97%, at least about 98%, or at least about 99%, sequence identity with SEQ ID NO: 708. In several embodiments, the membrane-bound truncated HIV Gp41, FLAG tag, GFP construct comprises the amino acid sequence of SEQ ID NO: 707 or an amino acid that shares at least about 80%, at least about 85%, at least about 90%, at least about 94%, at least about 95%, at least about 96%, at least about 97%, at least about 98%, or at least about 99%, sequence identity with SEQ ID NO: 707.

[0332] In several embodiments, there is provided a polynucleotide encoding a synthetic viral immunosuppressive peptide. In several embodiments, the polynucleotide encodes an amino acid sequence comprising SEQ ID NO: 240. In several embodiments, the polynucleotide encodes a sequence that shares at least about 80%, at least about 85%, at least about 90%, at least about 94%, at least about 95%, at least about 96%, at least about 97%, at least about 98%, or at least about 99%, sequence identity, homology and/or functional equivalence with SEQ ID NO: 240. In several embodiments, the polynucleotide comprises SEQ ID NO: 241 or shares at least about 80%, at least about 85%, at least about 90%, at least about 94%, at least about 95%, at least about 96%, at least about 97%, at least about 98%, or at least about 99%, sequence identity with SEQ ID NO: 241. In several embodiments, provided for is a membrane-bound synthetic viral immunosuppressive peptide. In several embodiments, the synthetic viral immunosuppressive peptide is coupled to a CD8α transmembrane protein and/or CD8α hinge domain. In several embodiments, the membrane-bound synthetic viral immunosuppressive peptide construct comprises one or more linker sequences. In several embodiments, the membrane-bound synthetic viral immunosuppressive peptide comprises a CD8α signal peptide, a synthetic viral immunosuppressive peptide trimer, a CD8α hinge, a and a CD8α transmembrane domain. In several embodiments, the membrane-bound synthetic viral immunosuppressive peptide construct is encoded by a polynucleotide that encodes an amino acid sequence comprising SEQ ID NO: 243 (or SEQ ID NO: 713). In several embodiments, the polynucleotide encodes a sequence that shares at least about 80%, at least about 85%, at least about 90%, at least about 94%, at least about 95%, at least about 96%, at least about 97%, at least about 98%, or at least about 99%, sequence identity, homology and/or functional equivalence with SEQ ID NO: 243 (or SEQ ID NO: 713). In several embodiments, the polynucleotide comprises SEQ ID NO: 244 (or SEQ ID NO: 714) or shares at least about 80%, at least about 85%, at least about 90%, at least about 94%, at least about 95%, at least about 96%, at least about 97%, at least about 98%, or at least about 99%, sequence identity with SEQ ID NO: 244 (or SEQ ID NO: 714). Optionally, the polynucleotide encodes a detectable tag (e.g., a FLAG tag) and/or can comprise an internal ribosome entry site (IRES) that allows for expression of an additional protein, such as a detectable tag (e.g., GFP). In several embodiments, the polynucleotide encoding membrane-bound synthetic viral immunosuppressive peptide and GFP comprises SEQ ID NO: 242 or shares at least about 80%, at least about 85%, at least about 90%, at least about 94%, at least about 95%, at least about 96%, at least about 97%, at least about 98%, or at least about 99%, sequence identity with SEQ ID NO: 242. In several embodiments, the polynucleotide encoding membrane-bound synthetic viral immunosuppressive peptide, a FLAG tag and GFP comprises SEQ ID NO: 712 or shares at least about 80%, at least about 85%, at least about 90%, at least about 94%, at least about 95%, at least about 96%, at least about 97%, at least about 98%, or at least about 99%, sequence identity with SEQ ID NO: 712. In several embodiments, membrane-bound synthetic viral immunosuppressive peptide, FLAG tag, GFP construct comprises the amino acid of SEQ ID NO: 712 or shares at least about 80%, at least about 85%, at least about 90%, at least about 94%, at least about 95%, at least about 96%, at least about 97%, at least about 98%, or at least about 99%, sequence identity with SEQ ID NO: 712.

[0333] In several embodiments, viral fusion peptides, or variants thereof, are used. By way of example, HIV initiates an immune evasive response by fusing to a target cell via a fusion peptide, a portion of which interacts with the T cell receptor on host T cells and suppresses their activation. In several embodiments, a portion of a viral fusion peptide is used. For example in several embodiments, an amino acid sequence comprising residues 5 to 13 of the HIV fusion peptide are used in an immunosuppressive effector as disclosed herein (e.g., incorporated into a CAR at one or more extracellular locations, or with one or more copies coupled to a transmembrane domain). In several embodiments, that amino acid sequence comprises SEQ ID NO: 467. In several embodiments, the amino acid sequence shares at least about 80%, at least about 85%, at least about 90%, at least about 94%, at least about 95%, at least about 96%, at least about 97%, at least about 98%, or at least about 99%, sequence identity, homology and/or functional equivalence with SEQ ID NO: 467. In several embodiments, a modified viral fusion protein is used in an immunosuppressive effector as disclosed herein (e.g., incorporated into a CAR at one or more extracellular locations, or with one or more copies coupled to a transmembrane domain). In several embodiments, that amino acid sequence comprises SEQ ID NO: 468. In several embodiments, the amino acid sequence shares at least about 80%, at least about 85%, at least about 90%, at least about 94%, at least about 95%, at least about 96%, at least about 97%, at least about 98%, or at least about 99%, sequence identity, homology and/or functional equivalence with SEQ ID NO: 468. In several embodiments, one or more consensus motifs derived from a viral fusion protein are used in an immunosuppressive effector as disclosed herein (e.g., incorporated into a CAR at one or more extracellular locations, or with one or more copies coupled to a transmembrane domain). In several embodiments, that amino acid consensus sequence comprises GXXXG (SEQ ID NO: 473) or AXXXG (SEQ ID NO: 474), where each X independently is any amino acid. In several embodiments, the amino acid sequence shares at least about 80%, at least about 85%, at least about 90%, at least about 94%, at least about 95%, at least about 96%, at least about 97%, at least about 98%, or at least about 99%, sequence identity, homology and/or functional equivalence with SEQ ID NO: 473 or 474, while maintaining the consensus motif. In several embodiments, these motifs are particularly advantageous in that they are suppressive towards T-cells and not NKs. Thus, in several embodiments, these peptides allow engineered NK cells to be developed without gene editing to reduce/knock out B2M expression and still effect functional reduction in host versus graft rejection (e.g., through T cell suppression alone).

[0334] In several embodiments, there is provided a polynucleotide encoding a p15E viral immunosuppressive trimeric peptide. In several embodiments, the polynucleotide encodes an amino acid sequence comprising SEQ ID NO: 250. In several embodiments, the polynucleotide encodes a sequence that shares at least about 80%, at least about 85%, at least about 90%, at least about 94%, at least about 95%, at least about 96%, at least about 97%, at least about 98%, or at least about 99%, sequence identity, homology and/or functional equivalence with SEQ ID NO: 250. In several embodiments, the polynucleotide comprises SEQ ID NO: 251 or shares at least about 80%, at least about 85%, at least about 90%, at least about 94%, at least about 95%, at least about 96%, at least about 97%, at least about 98%, or at least about 99%, sequence identity with SEQ ID NO: 251. In several embodiments, provided for is a membrane-bound p15E viral immunosuppressive trimeric peptide. In several embodiments, the p15E viral immunosuppressive trimeric peptide is coupled to a CD8α transmembrane protein and/or CD8α hinge domain. In several embodiments, the membrane-bound p15E viral immunosuppressive trimeric peptide construct comprises one or more linker sequences (e.g., in between the peptide repeats). In several embodiments, the membrane-bound p15E viral immunosuppressive trimeric peptide comprises a CD8αsignal peptide, a first p15E peptide, a linker (e.g., a GS linker), a second p15E peptide, a linker (e.g., a second GS linker), a third p15E peptide, a CD8α hinge, and a CD8α transmembrane domain. In several embodiments, the membrane-bound p15E viral immunosuppressive peptide construct is encoded by a polynucleotide that encodes an amino acid sequence comprising SEQ ID NO: 253 (or SEQ ID NO: 721). In several embodiments, the polynucleotide encodes a sequence that shares at least about 80%, at least about 85%, at least about 90%, at least about 94%, at least about 95%, at least about 96%, at least about 97%, at least about 98%, or at least about 99%, sequence identity, homology and/or functional equivalence with SEQ ID NO: 253 (or SEQ ID NO: 721). In several embodiments, the polynucleotide comprises SEQ ID NO: 254 (or SEQ ID NO: 722) or shares at least about 80%, at least about 85%, at least about 90%, at least about 94%, at least about 95%, at least about 96%, at least about 97%, at least about 98%, or at least about 99%, sequence identity with SEQ ID NO: 254 (or SEQ ID NO: 722). Optionally, the polynucleotide encodes a detectable tag (e.g., a FLAG tag) and/or can comprise an internal ribosome entry site (IRES) that allows for expression of an additional protein, such as a detectable tag (e.g., GFP). In several embodiments, the polynucleotide encoding membrane-bound trimeric p15E and GFP comprises SEQ ID NO: 252 or shares at least about 80%, at least about 85%, at least about 90%, at least about 94%, at least about 95%, at least about 96%, at least about 97%, at least about 98%, or at least about 99%, sequence identity with SEQ ID NO: 252. In several embodiments, the polynucleotide encoding membrane-bound trimeric p15E, a FLAG tag, and GFP comprises SEQ ID NO: 720 or shares at least about 80%, at least about 85%, at least about 90%, at least about 94%, at least about 95%, at least about 96%, at least about 97%, at least about 98%, or at least about 99%, sequence identity with SEQ ID NO: 720. In several embodiments, the membrane-bound trimeric p15E, FLAG tag, GFP construct comprises the amino acid sequence of SEQ ID NO: 719 or an amino acid that shares at least about 80%, at least about 85%, at least about 90%, at least about 94%, at least about 95%, at least about 96%, at least about 97%, at least about 98%, or at least about 99%, sequence identity with SEQ ID NO: 719.

[0335] Chimeric proteins that include one or more viral immunosuppressive peptides are also used, in several embodiments. One such chimeric protein comprises the human cytomegalovirus class I MHC homolog, UL18. As described in more detail below, in several embodiments, UL18 is incorporated into a CAR, or otherwise expressed (e.g., through chimeric UL18-B2M or in a dimer/trimer construct) in order to evade host-NK cell cytotoxicity through the UL18 binding to the NK cell inhibitory receptor LIR-1.

[0336] Additionally, certain sequence domains or even particular residues within viral immunosuppressive peptides can facilitate further engineering of chimeric antigen receptors and their expression. For example, certain residues could be used to engineer CAR dimers, e.g., through disulfide bonding. Such an approach could be utilized to supplement, or replace, the use of bi-specific CARs. For example, rather than engineering a single CAR with, by way of example an anti-CD19 binder and a binder of NKG2D ligands, two separate CARs are engineered, each with cysteine residues positioned in a manner that allowed for the formation of di-sulfide bridges between the two CARs and thus the self-assembly of a dimerized CAR in vivo.

[0337] Advantageously, the use of the viral immunosuppressive peptides can not only serve to help mute the host NK cell response against administered engineered cells, but it can be used for other purposes as well. For example, in some embodiments, an antibody directed to a viral peptide is administered to a subject who has been dosed with a cell product expressing a CAR that comprises one or more viral immunosuppressive peptides. The antibody functions to bind the viral peptide and induce depletion of the CAR-expressing cells (e.g., via antibody-based immune response), thus serving as a safety mechanism or a route to end a treatment. Similarly, during manufacture of an immune cell comprising a CAR with an included viral immunosuppressive peptide, antibody-based detection of the viral immunosuppressive peptide can be used to determine CAR expression levels.

CD47 and Other Immunosuppressive Peptides, and Combinations with Viral Immunosuppressive Peptides

[0338] In addition to viral immunosuppressive peptides, other immunosuppressive peptides or polypeptides are provided for herein. Like the viral immunosuppressive peptides, these polypeptides may be included in one or more regions of a CAR, or can be expressed in a membrane-bound format. These additional immunosuppressive polypeptides can also be used in connection with one or more viral immunosuppressive peptides (see, e.g., FIGS. 25 and 26 and description of viral peptides above).

[0339] In several embodiments endogenous “self” signals are re-purposed to impart immune evasiveness to engineered immune cells. One such “self” protein is CD47, which impedes phagocytosis (e.g., by macrophages) through signaling through the phagocyte receptor CD172a. In several embodiments, one or more domains (or sub-domains) of CD47 are incorporated into a CAR and/or expressed in an immune cell in a membrane-bound configuration. In several embodiments, the expression of CD47 (in whole or in part) functions to impart to the engineered immune cell the ability to reduce or avoid phagocytosis by host immune cells, thereby enhancing the persistence (and thus functional life-span) of the engineered immune cells.

[0340] Other immunosuppressive peptides are also provided for herein. In several embodiments, PD-L1 (also known as CD274, PDL1, or PDCD1 L1) or an immunosuppressive portion thereof is expressed by an engineered immune cell through incorporation into a CAR and/or in a membrane-bound fashion. In several embodiments, one or more TIGIT ligands, including but not limited to PVR (also known as CD155, NECL5, or NECL-5) and CD113 (also known as PROM1 or prominin 1) or an immunosuppressive portion of is expressed by an engineered immune cell through incorporation into a CAR and/or in a membrane-bound fashion. In several embodiments, CD200 or an immunosuppressive portion thereof is expressed by an engineered immune cell through incorporation into a CAR and/or in a membrane-bound fashion. In several embodiments, CD276 (also known as B7-H3) or an immunosuppressive portion thereof is expressed by an engineered immune cell through incorporation into a CAR and/or in a membrane-bound fashion. In several embodiments, B7-H4 (also known as VTCN1, B7S1, or B7X)) or an immunosuppressive portion thereof is expressed by an engineered immune cell through incorporation into a CAR and/or in a membrane-bound fashion. In several embodiments, HVEM (also known as TNFSFi4, CD270 or ATAR) or an immunosuppressive portion thereof is expressed by an engineered immune cell through incorporation into a CAR and/or in a membrane-bound fashion. In several embodiments, CEACAM5 (also known as CEA) or an immunosuppressive portion thereof is expressed by an engineered immune cell through incorporation into a CAR and/or in a membrane-bound fashion. In several embodiments, Galectin-9 (also known as LGALS9) or an immunosuppressive portion thereof is expressed by an engineered immune cell through incorporation into a CAR and/or in a membrane-bound fashion. In several embodiments, the expression of these immunosuppressive proteins (in whole or in part) functions to impart to the engineered immune cell the ability to reduce or avoid immune clearance by host immune cells (or other engineered immune cells), thereby enhancing the persistence (and thus functional life-span) of the engineered immune cells.

[0341] As discussed above with respect to the viral immunosuppressive peptides, the engineered immune cells, in several embodiments, are allogeneic cells. In several embodiments, allogeneic NK cells are used. In several embodiments, allogeneic T cells are used. In several embodiments, combinations (e.g., a mixed population) of allogeneic NK cell and allogeneic T cells are used.

[0342] In several embodiments, the engineered CAR comprises one or more copies of one or more of the following amino acid sequences: SEQ ID NO: 245, 280, 285, 286, 288, or 289. In several embodiments, the CAR includes an immunosuppressive fragment of SEQ ID NO: 287. As discussed above, those sequences (or individual sequence) can be positioned in the hinge region, the N-terminal region or within the target binder region (e.g., within the linker of an scFv). In several embodiments, the CAR comprises an amino acid sequence with at least about 80%, at least about 85%, at least about 90%, at least about 94%, at least about 95%, at least about 96%, at least about 97%, at least about 98%, or at least about 99%, sequence identity, homology and/or functional equivalence with any of SEQ ID NOs: SEQ ID NO: 245, 280, 285, 286, 288, or 289 or an immunosuppressive fragment of SEQ ID NO: 287.

[0343] In addition to incorporation of the viral immunosuppressive peptides being positioned in the CAR, these non-viral immunosuppressive polypeptides can be coupled to a domain that allows them to be expressed as a membrane bound polypeptides.

[0344] Various transmembrane proteins can be used, such as one or more of CD8α, CD4, CD3ε, CD3γ, CD3δ, CD3ζ, CD28, CD137, glycophorin A, glycophorin D, nicotinic acetylcholine receptor, a GABA receptor, FcεRIγ, and a T-cell receptor. In several embodiments, a portion of one or more of these domains (e.g., a transmembrane domain) is used to anchor or otherwise tether the immunosuppressive peptide(s) to the immune cell surface. In several embodiments, the transmembrane protein comprises a CD8αtransmembrane domain. In several embodiments, the CD8α transmembrane domain comprises the amino acid sequence of SEQ ID NO: 4, or a sequence with at least about 80%, about 85%, about 90%, about 95%, about 96%, about 97%, about 98% or about 99% sequence identity with SEQ ID NO: 4. In several embodiments, the CD8α transmembrane domain is encoded by the nucleic acid sequence of SEQ ID NO: 3, or a sequence with at least about 80%, about 85%, about 90%, about 95%, about 96%, about 97%, about 98% or about 99% sequence identity with SEQ ID NO: 3. In several embodiments, a hinge or other linker is used to couple the immunosuppressive peptide to the transmembrane protein. In several embodiments, a CD8α is used. In several embodiments, the CD8α hinge comprises the amino acid sequence of SEQ ID NO: 2, or a sequence with at least about 80%, about 85%, about 90%, about 95%, about 96%, about 97%, about 98% or about 99% sequence identity with SEQ ID NO: 2. In several embodiments, the CD8α hinge comprises the amino acid sequence of SEQ ID NO: 1, or a sequence with at least about 80%, about 85%, about 90%, about 95%, about 96%, about 97%, about 98% or about 99% sequence identity with SEQ ID NO: 1.

[0345] In several embodiments, there is provided a polynucleotide encoding a truncated CD47 immunosuppressive peptide. In several embodiments, the polynucleotide encodes an amino acid sequence comprising SEQ ID NO: 245. In several embodiments, the polynucleotide encodes a sequence that shares at least about 80%, at least about 85%, at least about 90%, at least about 94%, at least about 95%, at least about 96%, at least about 97%, at least about 98%, or at least about 99%, sequence identity, homology and/or functional equivalence with SEQ ID NO: 245. In several embodiments, the polynucleotide comprises SEQ ID NO: 246 or shares at least about 80%, at least about 85%, at least about 90%, at least about 94%, at least about 95%, at least about 96%, at least about 97%, at least about 98%, or at least about 99%, sequence identity with SEQ ID NO: 246. In several embodiments, provided for is a membrane-bound truncated CD47 immunosuppressive peptide. In several embodiments, the truncated CD47 immunosuppressive peptide is coupled to a CD8α transmembrane protein and/or CD8α hinge domain. In several embodiments, the membrane-bound truncated CD47 immunosuppressive peptide construct comprises one or more linker sequences. In several embodiments, the membrane-bound truncated CD47 immunosuppressive peptide comprises a CD8α signal peptide, a truncated CD47 peptide (e.g., positions 110-130 of the extracellular domain), a CD8α hinge, and a CD8α transmembrane domain. In several embodiments, the membrane-bound synthetic truncated CD47 immunosuppressive peptide construct is encoded by a polynucleotide that encodes an amino acid sequence comprising SEQ ID NO: 248 (or SEQ ID NO: 717). In several embodiments, the polynucleotide encodes a sequence that shares at least about 80%, at least about 85%, at least about 90%, at least about 94%, at least about 95%, at least about 96%, at least about 97%, at least about 98%, or at least about 99%, sequence identity, homology and/or functional equivalence with SEQ ID NO: 248 (or SEQ ID NO: 717). In several embodiments, the polynucleotide comprises SEQ ID NO: 249 (or SEQ ID NO: 718) or shares at least about 80%, at least about 85%, at least about 90%, at least about 94%, at least about 95%, at least about 96%, at least about 97%, at least about 98%, or at least about 99%, sequence identity with SEQ ID NO: 249 (or SEQ ID NO: 718). Optionally, the polynucleotide encodes a detectable tag (e.g., a FLAG tag) and/or can comprise an internal ribosome entry site (IRES) that allows for expression of an additional protein, such as a detectable tag (e.g., GFP). In several embodiments, the polynucleotide encoding membrane-bound truncated CD47 and GFP comprises SEQ ID NO: 247 or shares at least about 80%, at least about 85%, at least about 90%, at least about 94%, at least about 95%, at least about 96%, at least about 97%, at least about 98%, or at least about 99%, sequence identity with SEQ ID NO: 247. In several embodiments, the polynucleotide encoding membrane-bound truncated CD47, a FLAG tag and GFP comprises SEQ ID NO: 716 or shares at least about 80%, at least about 85%, at least about 90%, at least about 94%, at least about 95%, at least about 96%, at least about 97%, at least about 98%, or at least about 99%, sequence identity with SEQ ID NO: 716. In several embodiments, the membrane-bound truncated CD47, FLAG tag, GFP construct comprises the amino acid sequence of SEQ ID NO: 715 or an amino acid that shares at least about 80%, at least about 85%, at least about 90%, at least about 94%, at least about 95%, at least about 96%, at least about 97%, at least about 98%, or at least about 99%, sequence identity with SEQ ID NO: 715.

[0346] As discussed above, any of the viral immunosuppressive peptides may be used in combination with one or more non-viral immunosuppressive peptides.

[0347] In several embodiments, there is provided a polynucleotide encoding a p15E viral immunosuppressive peptide truncated CD47 construct (p15E_tCD47). In several embodiments, provided for is a membrane-bound p15E_tCD47 construct. In several embodiments, the truncated CD47 peptide comprises a peptide corresponding to positions 110-130 of the extracellular domain of CD47. In several embodiments, the p15E_tCD47 construct is coupled to a CD8α transmembrane protein and/or CD8α hinge domain. In several embodiments, the membrane-bound p15E_tCD47 construct comprises one or more linker sequences. In several embodiments, the membrane-bound p15E_tCD47 construct comprises a CD8α signal peptide, a p15E peptide, a linker (e.g., a GS linker), a truncated CD47 peptide, CD8α hinge, and a CD8α transmembrane domain. In several embodiments, the membrane-bound p15E_tCD47 construct is encoded by a polynucleotide that encodes an amino acid sequence comprising SEQ ID NO: 256 (or SEQ ID NO: 725). In several embodiments, the polynucleotide encodes a sequence that shares at least about 80%, at least about 85%, at least about 90%, at least about 94%, at least about 95%, at least about 96%, at least about 97%, at least about 98%, or at least about 99%, sequence identity, homology and/or functional equivalence with SEQ ID NO: 256 (or SEQ ID NO: 725). In several embodiments, the polynucleotide comprises SEQ ID NO: 257 (or SEQ ID NO: 726) or shares at least about 80%, at least about 85%, at least about 90%, at least about 94%, at least about 95%, at least about 96%, at least about 97%, at least about 98%, or at least about 99%, sequence identity with SEQ ID NO: 257 (or SEQ ID NO: 726). Optionally, the polynucleotide encodes a detectable tag (e.g., a FLAG tag) and/or can comprise an internal ribosome entry site (IRES) that allows for expression of an additional protein, such as a detectable tag (e.g., GFP). In several embodiments, the polynucleotide encoding the membrane-bound p15E_tCD47 construct and GFP comprises SEQ ID NO: 255 or shares at least about 80%, at least about 85%, at least about 90%, at least about 94%, at least about 95%, at least about 96%, at least about 97%, at least about 98%, or at least about 99%, sequence identity with SEQ ID NO: 255. In several embodiments, the polynucleotide encoding the membrane-bound p15E_tCD47 construct, a FLAG tag, and GFP comprises SEQ ID NO: 724 or shares at least about 80%, at least about 85%, at least about 90%, at least about 94%, at least about 95%, at least about 96%, at least about 97%, at least about 98%, or at least about 99%, sequence identity with SEQ ID NO: 724. In several embodiments, the membrane-bound p15E_tCD47, FLAG tag, GFP construct comprises the amino acid sequence of SEQ ID NO: 723 or an amino acid that shares at least about 80%, at least about 85%, at least about 90%, at least about 94%, at least about 95%, at least about 96%, at least about 97%, at least about 98%, or at least about 99%, sequence identity with SEQ ID NO: 723.

[0348] In several embodiments, there is provided a polynucleotide encoding a p15E viral immunosuppressive peptide truncated CD47 construct (tCD47_p15E), a swap of the peptides of the construct just described. In several embodiments, provided for is a membrane-bound tCD47_p15E construct. In several embodiments, the truncated CD47 peptide comprises a peptide corresponding to positions 110-130 of the extracellular domain of CD47. In several embodiments, the tCD47_p15E construct is coupled to a CD8α transmembrane protein and/or CD8α hinge domain. In several embodiments, the membrane-bound tCD47_p15E construct comprises one or more linker sequences. In several embodiments, the membrane-bound tCD47_p15E construct comprises a CD8α signal peptide, a truncated CD47 peptide, a linker (e.g., a GS linker), a p15E peptide, a CD8α hinge, and a CD8α transmembrane domain. In several embodiments, the membrane-bound tCD47_p15E construct is encoded by a polynucleotide that encodes an amino acid sequence comprising SEQ ID NO: 259 (or SEQ ID NO: 729). In several embodiments, the polynucleotide encodes a sequence that shares at least about 80%, at least about 85%, at least about 90%, at least about 94%, at least about 95%, at least about 96%, at least about 97%, at least about 98%, or at least about 99%, sequence identity, homology and/or functional equivalence with SEQ ID NO: 259 (or SEQ ID NO: 729). In several embodiments, the polynucleotide comprises SEQ ID NO: 260 (or SEQ ID NO: 730) or shares at least about 80%, at least about 85%, at least about 90%, at least about 94%, at least about 95%, at least about 96%, at least about 97%, at least about 98%, or at least about 99%, sequence identity with SEQ ID NO: 260 (or SEQ ID NO: 730). Optionally, the polynucleotide encodes a detectable tag (e.g., a FLAG tag) and/or can comprise an internal ribosome entry site (IRES) that allows for expression of an additional protein, such as a detectable tag (e.g., GFP). In several embodiments, the polynucleotide encoding the membrane-bound tCD47_p15E construct and GFP comprises SEQ ID NO: 258 or shares at least about 80%, at least about 85%, at least about 90%, at least about 94%, at least about 95%, at least about 96%, at least about 97%, at least about 98%, or at least about 99%, sequence identity with SEQ ID NO: 258. In several embodiments, the polynucleotide encoding the membrane-bound tCD47_p15E construct, a FLAG tag, and GFP comprises SEQ ID NO: 728 or shares at least about 80%, at least about 85%, at least about 90%, at least about 94%, at least about 95%, at least about 96%, at least about 97%, at least about 98%, or at least about 99%, sequence identity with SEQ ID NO: 728. In several embodiments, the membrane-bound tCD47_p15E, FLAG tag, GFP construct comprises the amino acid sequence of SEQ ID NO: 727 or an amino acid that shares at least about 80%, at least about 85%, at least about 90%, at least about 94%, at least about 95%, at least about 96%, at least about 97%, at least about 98%, or at least about 99%, sequence identity with SEQ ID NO: 727.

[0349] In several embodiments, there is provided a polynucleotide encoding a modified HIV Gp41 viral immunosuppressive peptide truncated CD47 construct (HIV_L_tCD47). In several embodiments, provided for is a membrane-bound HIV_L_tCD47 construct. In several embodiments, the truncated CD47 peptide comprises a peptide corresponding to positions 110-130 of the extracellular domain of CD47. In several embodiments, the HIV_L_tCD47 construct is coupled to a CD8α transmembrane protein and/or CD8α hinge domain. In several embodiments, the membrane-bound HIV_L_tCD47 construct comprises one or more linker sequences. In several embodiments, the membrane-bound HIV_L_tCD47 construct comprises a CD8α signal peptide, a modified HIV Gp41 viral immunosuppressive peptide, a linker (e.g., a GS linker), a truncated CD47 peptide, a CD8α hinge, and a CD8α transmembrane domain. In several embodiments, the membrane-bound HIV_L_tCD47 construct is encoded by a polynucleotide that encodes an amino acid sequence comprising SEQ ID NO: 262 (or SEQ ID NO: 733). In several embodiments, the polynucleotide encodes a sequence that shares at least about 80%, at least about 85%, at least about 90%, at least about 94%, at least about 95%, at least about 96%, at least about 97%, at least about 98%, or at least about 99%, sequence identity, homology and/or functional equivalence with SEQ ID NO: 262 (or SEQ ID NO: 733). In several embodiments, the polynucleotide comprises SEQ ID NO: 263 (or SEQ ID NO: 734) or shares at least about 80%, at least about 85%, at least about 90%, at least about 94%, at least about 95%, at least about 96%, at least about 97%, at least about 98%, or at least about 99%, sequence identity with SEQ ID NO: 263 (or SEQ ID NO: 734). Optionally, the polynucleotide encodes a detectable tag (e.g., a FLAG tag) and/or can comprise an internal ribosome entry site (IRES) that allows for expression of an additional protein, such as a detectable tag (e.g., GFP). In several embodiments, the polynucleotide encoding the membrane-bound HIV_L_tCD47 construct and GFP comprises SEQ ID NO: 261 or shares at least about 80%, at least about 85%, at least about 90%, at least about 94%, at least about 95%, at least about 96%, at least about 97%, at least about 98%, or at least about 99%, sequence identity with SEQ ID NO: 261. In several embodiments, the polynucleotide encoding the membrane-bound HIV_L_tCD47 construct, a FLAG tag, and GFP comprises SEQ ID NO: 732 or shares at least about 80%, at least about 85%, at least about 90%, at least about 94%, at least about 95%, at least about 96%, at least about 97%, at least about 98%, or at least about 99%, sequence identity with SEQ ID NO: 732. In several embodiments, the membrane-bound HIV_L_tCD47, FLAG tag, GFP construct comprises the amino acid sequence of SEQ ID NO: 731 or an amino acid that shares at least about 80%, at least about 85%, at least about 90%, at least about 94%, at least about 95%, at least about 96%, at least about 97%, at least about 98%, or at least about 99%, sequence identity with SEQ ID NO: 731.

[0350] In several embodiments, there is provided a polynucleotide encoding an HIV Gp41 viral immunosuppressive peptide truncated CD47 construct (HIV_S_tCD47). In several embodiments, provided for is a membrane-bound HIV_S_tCD47 construct. In several embodiments, the truncated CD47 peptide comprises a peptide corresponding to positions 110-130 of the extracellular domain of CD47. In several embodiments, the HIV_S_tCD47 construct is coupled to a CD8α transmembrane protein and/or CD8αhinge domain. In several embodiments, the membrane-bound HIV_S_tCD47 construct comprises one or more linker sequences. In several embodiments, the membrane-bound HIV_S_tCD47 construct comprises a CD8α signal peptide, an HIV Gp41 viral immunosuppressive peptide, a linker (e.g., a GS linker), a truncated CD47 peptide, a CD8α hinge, and a CD8α transmembrane domain. In several embodiments, the membrane-bound HIV_S_tCD47 construct is encoded by a polynucleotide that encodes an amino acid sequence comprising SEQ ID NO: 265 (or SEQ ID NO: 737). In several embodiments, the polynucleotide encodes a sequence that shares at least about 80%, at least about 85%, at least about 90%, at least about 94%, at least about 95%, at least about 96%, at least about 97%, at least about 98%, or at least about 99%, sequence identity, homology and/or functional equivalence with SEQ ID NO: 265 (or SEQ ID NO: 737). In several embodiments, the polynucleotide comprises SEQ ID NO: 266 (or SEQ ID NO: 738) or shares at least about 80%, at least about 85%, at least about 90%, at least about 94%, at least about 95%, at least about 96%, at least about 97%, at least about 98%, or at least about 99%, sequence identity with SEQ ID NO: 266 (or SEQ ID NO: 738). Optionally, the polynucleotide encodes a detectable tag (e.g., a FLAG tag) and/or can comprise an internal ribosome entry site (IRES) that allows for expression of an additional protein, such as a detectable tag (e.g., GFP). In several embodiments, the polynucleotide encoding the membrane-bound HIV_S_tCD47 construct and GFP comprises SEQ ID NO: 264 or shares at least about 80%, at least about 85%, at least about 90%, at least about 94%, at least about 95%, at least about 96%, at least about 97%, at least about 98%, or at least about 99%, sequence identity with SEQ ID NO: 264. In several embodiments, the polynucleotide encoding the membrane-bound HIV_S_tCD47 construct, a FLAG tag, and GFP comprises SEQ ID NO: 736 or shares at least about 80%, at least about 85%, at least about 90%, at least about 94%, at least about 95%, at least about 96%, at least about 97%, at least about 98%, or at least about 99%, sequence identity with SEQ ID NO: 736. In several embodiments, the membrane-bound HIV_S_tCD47, FLAG tag, GFP construct comprises the amino acid sequence of SEQ ID NO: 735 or an amino acid that shares at least about 80%, at least about 85%, at least about 90%, at least about 94%, at least about 95%, at least about 96%, at least about 97%, at least about 98%, or at least about 99%, sequence identity with SEQ ID NO: 735.

[0351] In several embodiments, there is provided a polynucleotide encoding an HTLV viral immunosuppressive peptide truncated CD47 construct (HTLV_tCD47). In several embodiments, provided for is a membrane-bound HTLV_tCD47 construct. In several embodiments, the truncated CD47 peptide comprises a peptide corresponding to positions 110-130 of the extracellular domain of CD47. In several embodiments, the HTLV_tCD47 construct is coupled to a CD8α transmembrane protein and/or CD8α hinge domain. In several embodiments, the membrane-bound HTLV_tCD47 construct comprises one or more linker sequences. In several embodiments, the membrane-bound HTLV_tCD47 construct comprises a CD8α signal peptide, an HTLV viral immunosuppressive peptide, a linker (e.g., a GS linker), a truncated CD47 peptide, a CD8α hinge, and a CD8α transmembrane domain. In several embodiments, the membrane-bound HTLV_tCD47 construct is encoded by a polynucleotide that encodes an amino acid sequence comprising SEQ ID NO: 268 (or SEQ ID NO: 741). In several embodiments, the polynucleotide encodes a sequence that shares at least about 80%, at least about 85%, at least about 90%, at least about 94%, at least about 95%, at least about 96%, at least about 97%, at least about 98%, or at least about 99%, sequence identity, homology and/or functional equivalence with SEQ ID NO: 268 (or SEQ ID NO: 741). In several embodiments, the polynucleotide comprises SEQ ID NO: 269 (or SEQ ID NO: 742) or shares at least about 80%, at least about 85%, at least about 90%, at least about 94%, at least about 95%, at least about 96%, at least about 97%, at least about 98%, or at least about 99%, sequence identity with SEQ ID NO: 269 (or SEQ ID NO: 742). Optionally, the polynucleotide encodes a detectable tag (e.g., a FLAG tag) and/or can comprise an internal ribosome entry site (IRES) that allows for expression of an additional protein, such as a detectable tag (e.g., GFP). In several embodiments, the polynucleotide encoding the membrane-bound HTLV_tCD47 construct and GFP comprises SEQ ID NO: 267 or shares at least about 80%, at least about 85%, at least about 90%, at least about 94%, at least about 95%, at least about 96%, at least about 97%, at least about 98%, or at least about 99%, sequence identity with SEQ ID NO: 267. In several embodiments, the polynucleotide encoding the membrane-bound HTLV_tCD47 construct, a FLAG tag, and GFP comprises SEQ ID NO: 740 or shares at least about 80%, at least about 85%, at least about 90%, at least about 94%, at least about 95%, at least about 96%, at least about 97%, at least about 98%, or at least about 99%, sequence identity with SEQ ID NO: 740. In several embodiments, the membrane-bound HTLV_tCD47, FLAG tag, GFP construct comprises the amino acid sequence of SEQ ID NO: 739 or an amino acid that shares at least about 80%, at least about 85%, at least about 90%, at least about 94%, at least about 95%, at least about 96%, at least about 97%, at least about 98%, or at least about 99%, sequence identity with SEQ ID NO: 739.

[0352] In several embodiments, there is provided a polynucleotide encoding a truncated CD47-p15E-dimer viral immunosuppressive peptide truncated CD47 construct (tCD47_p15Ex2). In several embodiments, provided for is a membrane-bound tCD47_p15Ex2 construct. In several embodiments, the truncated CD47 peptide comprises a peptide corresponding to positions 110-130 of the extracellular domain of CD47. In several embodiments, the tCD47_p15Ex2 construct is coupled to a CD8α transmembrane protein and/or CD8α hinge domain. In several embodiments, the membrane-bound tCD47_p15Ex2 construct comprises one or more linker sequences. In several embodiments, the membrane-bound tCD47_p15Ex2 construct comprises a CD8α signal peptide, a truncated CD47 peptide, a linker (e.g., a GS linker), a first p15E peptide, a linker (e.g., a GS linker), a second p15E peptide, a CD8α hinge, and a CD8αtransmembrane domain. In several embodiments, the membrane-bound tCD47_p15Ex2 construct is encoded by a polynucleotide that encodes an amino acid sequence comprising SEQ ID NO: 271 (or SEQ ID NO: 745). In several embodiments, the polynucleotide encodes a sequence that shares at least about 80%, at least about 85%, at least about 90%, at least about 94%, at least about 95%, at least about 96%, at least about 97%, at least about 98%, or at least about 99%, sequence identity, homology and/or functional equivalence with SEQ ID NO: 271 (or SEQ ID NO: 745). In several embodiments, the polynucleotide comprises SEQ ID NO: 272 (or SEQ ID NO: 746) or shares at least about 80%, at least about 85%, at least about 90%, at least about 94%, at least about 95%, at least about 96%, at least about 97%, at least about 98%, or at least about 99%, sequence identity with SEQ ID NO: 272 (or SEQ ID NO: 746). Optionally, the polynucleotide encodes a detectable tag (e.g., a FLAG tag) and/or can comprise an internal ribosome entry site (IRES) that allows for expression of an additional protein, such as a detectable tag (e.g., GFP). In several embodiments, the polynucleotide encoding the membrane-bound tCD47_p15Ex2 construct and GFP comprises SEQ ID NO: 270 or shares at least about 80%, at least about 85%, at least about 90%, at least about 94%, at least about 95%, at least about 96%, at least about 97%, at least about 98%, or at least about 99%, sequence identity with SEQ ID NO: 270. In several embodiments, the polynucleotide encoding the membrane-bound tCD47_p15Ex2 construct, a FLAG tag, and GFP comprises SEQ ID NO: 744 or shares at least about 80%, at least about 85%, at least about 90%, at least about 94%, at least about 95%, at least about 96%, at least about 97%, at least about 98%, or at least about 99%, sequence identity with SEQ ID NO: 744. In several embodiments, the membrane-bound tCD47_p15Ex2, FLAG tag, GFP construct comprises the amino acid sequence of SEQ ID NO: 743 or an amino acid that shares at least about 80%, at least about 85%, at least about 90%, at least about 94%, at least about 95%, at least about 96%, at least about 97%, at least about 98%, or at least about 99%, sequence identity with SEQ ID NO: 743.

[0353] Additionally, according to several embodiments, combinations and/or replicates of various viral peptides are provided for. See FIGS. 42A and 42B, for example. FIG. 42A shows a non-limiting schematic of construct according to embodiments disclosed herein, in which a domain designed to reduce cytotoxic effects on a cell expressing such a construct (also referred to as a hypoimmune domain) is coupled to at least a transmembrane domain or (as shown in the non-limiting schematic), in some embodiments, integrated into a CAR construct. In several embodiments, viral peptides such as those disclosed herein are integrated into the CAR (e.g., CKS-17, p15E, including p15E-long, and/or HTLV). As shown in FIG. 42B, multimeric formats are provided for, in several embodiments, such as doublet or triplet of p15E (including p15E-long). Viral and non-viral peptides may also be used in combination, such as any of a synthetic TCR blocking peptide, HIV TCR blocking peptides (including truncated formats), an inhibitory receptor peptide (such as tCD47) with any of the other viral peptides disclosed herein. Non-limiting examples include p15E-tCD47, tCD47-p15E, HIV-long-TCD47, HIV-short-tCD47, HTLV-tCD47, and tCD47-p15E (doublet or triplet, optionally long format).

[0354] In several embodiments, there is provided a polynucleotide encoding a synthetic CKS-17 viral immunosuppressive peptide. In several embodiments, provided for is a membrane-bound synthetic CKS-17 viral immunosuppressive peptide. In several embodiments, the synthetic CKS-17 viral immunosuppressive peptide is coupled to a CD8α transmembrane protein and/or CD8α hinge domain. In several embodiments, the membrane-bound synthetic CKS-17 viral immunosuppressive peptide construct comprises one or more linker sequences. In several embodiments, the membrane-bound synthetic CKS-17 viral immunosuppressive peptide comprises a CD8α signal peptide, synthetic CKS-17, a CD8α hinge, and a CD8α transmembrane domain. In several embodiments, the membrane-bound synthetic CKS-17 viral immunosuppressive peptide construct is encoded by a polynucleotide that encodes an amino acid sequence comprising SEQ ID NO: 749. In several embodiments, the polynucleotide encodes a sequence that shares at least about 80%, at least about 85%, at least about 90%, at least about 94%, at least about 95%, at least about 96%, at least about 97%, at least about 98%, or at least about 99%, sequence identity, homology and/or functional equivalence with SEQ ID NO: 749. In several embodiments, the polynucleotide comprises SEQ ID NO: 750 or shares at least about 80%, at least about 85%, at least about 90%, at least about 94%, at least about 95%, at least about 96%, at least about 97%, at least about 98%, or at least about 99%, sequence identity with SEQ ID NO: 750. In several embodiments, the polynucleotide encoding membrane-bound synthetic CKS-17 also encodes GFP (without an IRES or a linker) and comprises SEQ ID NO: 748 or shares at least about 80%, at least about 85%, at least about 90%, at least about 94%, at least about 95%, at least about 96%, at least about 97%, at least about 98%, or at least about 99%, sequence identity with SEQ ID NO: 748. In several embodiments, the membrane-bound synthetic CKS-17-GFP construct comprises SEQ ID NO: 747 or shares at least about 80%, at least about 85%, at least about 90%, at least about 94%, at least about 95%, at least about 96%, at least about 97%, at least about 98%, or at least about 99%, sequence identity with SEQ ID NO: 747.

[0355] In several embodiments, a truncated CD47 immunosuppressive peptide is employed. In several embodiments, there is provided a polynucleotide that encodes an amino acid sequence comprising SEQ ID NO: 754. In several embodiments, the polynucleotide encodes a sequence that shares at least about 80%, at least about 85%, at least about 90%, at least about 94%, at least about 95%, at least about 96%, at least about 97%, at least about 98%, or at least about 99%, sequence identity, homology and/or functional equivalence with SEQ ID NO: 754. In several embodiments, the polynucleotide comprises SEQ ID NO: 753 or shares at least about 80%, at least about 85%, at least about 90%, at least about 94%, at least about 95%, at least about 96%, at least about 97%, at least about 98%, or at least about 99%, sequence identity with SEQ ID NO: 753. Optionally, the polynucleotide encodes a detectable tag (e.g., a FLAG tag) and/or can comprise an internal ribosome entry site (IRES) that allows for expression of an additional protein, such as a detectable tag (e.g., GFP). In several embodiments, the polynucleotide encoding truncated CD47 and GFP comprises SEQ ID NO: 752 or shares at least about 80%, at least about 85%, at least about 90%, at least about 94%, at least about 95%, at least about 96%, at least about 97%, at least about 98%, or at least about 99%, sequence identity with SEQ ID NO: 752. In several embodiments, the truncated CD47-GFP construct comprises the amino acid sequence of SEQ ID NO: 751 or an amino acid that shares at least about 80%, at least about 85%, at least about 90%, at least about 94%, at least about 95%, at least about 96%, at least about 97%, at least about 98%, or at least about 99%, sequence identity with SEQ ID NO: 751.

[0356] In several embodiments, there is provided a polynucleotide encoding an HIV Gp41 viral immunosuppressive peptide construct that includes a native HIV transmembrane domain (fGP41_HIVtm). In several embodiments, the HIV Gp41 viral immunosuppressive peptide is coupled to a CD8α signal peptide (e.g., for expression purposes, the sequence of which is MALPVTALLLPLALLLHAARP (SEQ ID NO 895) at the amino acid level and ATGGCACTCCCCGTAACTGCTCTGCTGCTG CCGTTGGCATTGCTCCTGCACGCCGCACGCCCG (SEQ ID NO 896) at the nucleotide level). In several embodiments, the HIV Gp41 viral immunosuppressive construct comprises a CD8α signal peptide and HIV Gp41 and is encoded by a polynucleotide that encodes an amino acid sequence comprising SEQ ID NO:757. In several embodiments, the polynucleotide encodes a sequence that shares at least about 80%, at least about 85%, at least about 90%, at least about 94%, at least about 95%, at least about 96%, at least about 97%, at least about 98%, or at least about 99%, sequence identity, homology and/or functional equivalence with SEQ ID NO: 757. In several embodiments, the polynucleotide comprises SEQ ID NO: 758 or shares at least about 80%, at least about 85%, at least about 90%, at least about 94%, at least about 95%, at least about 96%, at least about 97%, at least about 98%, or at least about 99%, sequence identity with SEQ ID NO: 758. Optionally, the polynucleotide encodes a detectable tag (e.g., a FLAG tag) and/or can comprise an internal ribosome entry site (IRES) that allows for expression of an additional protein, such as a detectable tag (e.g., GFP). n several embodiments, a linker (e.g., a GS linker) is positioned between the Gp41 domain and the tag. In several embodiments, the polynucleotide encoding HIV Gp41 and GFP comprises SEQ ID NO: 756 or shares at least about 80%, at least about 85%, at least about 90%, at least about 94%, at least about 95%, at least about 96%, at least about 97%, at least about 98%, or at least about 99%, sequence identity with SEQ ID NO: 756. In several embodiments, the fGP41_HIVtm-GFP construct comprises that amino acid sequence of SEQ ID NO: 755 or an amino acid that shares at least about 80%, at least about 85%, at least about 90%, at least about 94%, at least about 95%, at least about 96%, at least about 97%, at least about 98%, or at least about 99%, sequence identity with SEQ ID NO: 755.

[0357] In several embodiments, there is provided a polynucleotide encoding a p15E transmembrane domain immunosuppressive peptide (p15Etm_sf). In several embodiments, the p15E transmembrane domain is coupled to a CD8α signal peptide (e.g., for expression purposes, the sequence of which is provided for separately herein). In several embodiments, the p15E transmembrane domain immunosuppressive construct comprises a CD8α signal peptide and the p15E transmembrane domain and is encoded by a polynucleotide that encodes an amino acid sequence comprising SEQ ID NO: 761. In several embodiments, the polynucleotide encodes a sequence that shares at least about 90%, at least about 94%, at least about 95%, at least about 96%, at least about 97%, at least about 98%, or at least about 99%, sequence identity, homology and/or functional equivalence with SEQ ID NO:761. In several embodiments, the polynucleotide comprises SEQ ID NO: 762 or shares at least about 80%, at least about 85%, at least about 90%, at least about 94%, at least about 95%, at least about 96%, at least about 97%, at least about 98%, or at least about 99%, sequence identity with SEQ ID NO: 762. Optionally, the polynucleotide encodes a detectable tag (e.g., a FLAG tag) and/or can comprise an internal ribosome entry site (IRES) that allows for expression of an additional protein, such as a detectable tag (e.g., GFP). In several embodiments, a linker (e.g., a GS linker) is positioned between the p15E transmembrane domain and the tag. In several embodiments, the polynucleotide encoding the p15E transmembrane domain and GFP comprises SEQ ID NO: 760 or shares at least about 80%, at least about 85%, at least about 90%, at least about 94%, at least about 95%, at least about 96%, at least about 97%, at least about 98%, or at least about 99%, sequence identity with SEQ ID NO: 760. In several embodiments, the p15E transmembrane domain-GFP construct comprises the amino acid sequence of SEQ ID NO: 759 or an amino acid that shares at least about 80%, at least about 85%, at least about 90%, at least about 94%, at least about 95%, at least about 96%, at least about 97%, at least about 98%, or at least about 99%, sequence identity with SEQ ID NO: 759.

[0358] In several embodiments, there is provided a polynucleotide encoding a CD43-derived immunosuppressive peptide (fCD43_TM). In several embodiments, the CD43 peptide is coupled to a CD8αsignal peptide (e.g., for expression purposes, the sequence of which is provided for separately herein). In several embodiments, the CD43 immunosuppressive construct comprises a CD8α signal peptide and the CD43 peptide and is encoded by a polynucleotide that encodes an amino acid sequence comprising SEQ ID NO: 765. In several embodiments, the amino acid sequence shares at least about 90%, at least about 94%, at least about 95%, at least about 96%, at least about 97%, at least about 98%, or at least about 99%, sequence identity, homology and/or functional equivalence with SEQ ID NO: 765. In several embodiments, the polynucleotide comprises SEQ ID NO: 766 or shares at least about 80%, at least about 85%, at least about 90%, at least about 94%, at least about 95%, at least about 96%, at least about 97%, at least about 98%, or at least about 99%, sequence identity with SEQ ID NO: 766. Optionally, the polynucleotide encodes a detectable tag (e.g., a FLAG tag) and/or can comprise an internal ribosome entry site (IRES) that allows for expression of an additional protein, such as a detectable tag (e.g., GFP). In several embodiments, a linker (e.g., a GS linker) is positioned between the CD43 and the tag. In several embodiments, the polynucleotide encoding fCD43 and GFP comprises SEQ ID NO: 764 or shares at least about 80%, at least about 85%, at least about 90%, at least about 94%, at least about 95%, at least about 96%, at least about 97%, at least about 98%, or at least about 99%, sequence identity with SEQ ID NO: 764. In several embodiments, the CD43-GFP construct comprises the amino acid sequence of SEQ ID NO: 763 or an amino acid that shares at least about 80%, at least about 85%, at least about 90%, at least about 94%, at least about 95%, at least about 96%, at least about 97%, at least about 98%, or at least about 99%, sequence identity with SEQ ID NO: 763.

[0359] In several embodiments, there is provided a polynucleotide encoding a latent membrane protein 1 (LMP1) peptide of the Epstein-Barr Virus (LMP1_TM). In several embodiments, the LMP1 peptide is coupled to a CD8α signal peptide (e.g., for expression purposes, the sequence of which is provided for separately herein). In several embodiments, the LMP1 immunosuppressive construct comprises a CD8αsignal peptide and the LMP1 peptide and is encoded by a polynucleotide that encodes an amino acid sequence comprising SEQ ID NO: 769. In several embodiments, the amino acid sequence shares at least about 90%, at least about 94%, at least about 95%, at least about 96%, at least about 97%, at least about 98%, or at least about 99%, sequence identity, homology and/or functional equivalence with SEQ ID NO: 769. In several embodiments, the polynucleotide comprises SEQ ID NO: 770 or shares at least about 80%, at least about 85%, at least about 90%, at least about 94%, at least about 95%, at least about 96%, at least about 97%, at least about 98%, or at least about 99%, sequence identity with SEQ ID NO: 770. Optionally, the polynucleotide encodes a detectable tag (e.g., a FLAG tag) and/or can comprise an internal ribosome entry site (IRES) that allows for expression of an additional protein, such as a detectable tag (e.g., GFP). In several embodiments, a linker (e.g., a GS linker) is positioned between the LMP1 and the tag. In several embodiments, the polynucleotide encoding fLMP1 and GFP comprises SEQ ID NO: 768 or shares at least about 80%, at least about 85%, at least about 90%, at least about 94%, at least about 95%, at least about 96%, at least about 97%, at least about 98%, or at least about 99%, sequence identity with SEQ ID NO: 768. In several embodiments, the LMP1-GFP construct comprises the amino acid sequence of SEQ ID NO: 767 or an amino acid that shares at least about 80%, at least about 85%, at least about 90%, at least about 94%, at least about 95%, at least about 96%, at least about 97%, at least about 98%, or at least about 99%, sequence identity with SEQ ID NO: 767.

[0360] In several embodiments, there is provided a polynucleotide encoding a glycoprotein D (gD) of the Herpes Simplex Virus (fgD_TM). In several embodiments, the gD peptide is coupled to a CD8αsignal peptide (e.g., for expression purposes, the sequence of which is provided for separately herein). In several embodiments, the gD immunosuppressive construct comprises a CD8α signal peptide and the gD peptide and is encoded by a polynucleotide that encodes an amino acid sequence comprising SEQ ID NO: 773. In several embodiments, the amino acid sequence shares at least about 90%, at least about 94%, at least about 95%, at least about 96%, at least about 97%, at least about 98%, or at least about 99%, sequence identity, homology and/or functional equivalence with SEQ ID NO: 773. In several embodiments, the polynucleotide comprises SEQ ID NO: 774 or shares at least about 80%, at least about 85%, at least about 90%, at least about 94%, at least about 95%, at least about 96%, at least about 97%, at least about 98%, or at least about 99%, sequence identity with SEQ ID NO: 774. Optionally, the polynucleotide encodes a detectable tag (e.g., a FLAG tag) and/or can comprise an internal ribosome entry site (IRES) that allows for expression of an additional protein, such as a detectable tag (e.g., GFP). In several embodiments, a linker (e.g., a GS linker) is positioned between the gD and the tag. In several embodiments, the polynucleotide encoding gD and GFP comprises SEQ ID NO: 772 or shares at least about 80%, at least about 85%, at least about 90%, at least about 94%, at least about 95%, at least about 96%, at least about 97%, at least about 98%, or at least about 99%, sequence identity with SEQ ID NO: 772. In several embodiments, the gD-GFP construct comprises the amino acid sequence of SEQ ID NO: 771 or an amino acid that shares at least about 80%, at least about 85%, at least about 90%, at least about 94%, at least about 95%, at least about 96%, at least about 97%, at least about 98%, or at least about 99%, sequence identity with SEQ ID NO: 771.

[0361] In several embodiments, there is provided a polynucleotide encoding a lectin-like transcript 1 (LLT1), which, when interacting with CD161, inhibits Natural Killer cell activation and contributes to tumor cell immunosuppressive properties. In several embodiments, the LLT1 peptide is coupled to a CD8α signal peptide (e.g., for expression purposes, the sequence of which is provided for separately herein). In several embodiments, the LLT1 immunosuppressive construct comprises a CD8α signal peptide and the LLT1 peptide and is encoded by a polynucleotide that encodes an amino acid sequence comprising SEQ ID NO: 777. In several embodiments, the amino acid sequence shares at least about 90%, at least about 94%, at least about 95%, at least about 96%, at least about 97%, at least about 98%, or at least about 99%, sequence identity, homology and/or functional equivalence with SEQ ID NO: 777. In several embodiments, the polynucleotide comprises SEQ ID NO: 778 or shares at least about 80%, at least about 85%, at least about 90%, at least about 94%, at least about 95%, at least about 96%, at least about 97%, at least about 98%, or at least about 99%, sequence identity with SEQ ID NO: 778. Optionally, the polynucleotide encodes a detectable tag (e.g., a FLAG tag) and/or can comprise an internal ribosome entry site (IRES) that allows for expression of an additional protein, such as a detectable tag (e.g., GFP). In several embodiments, a linker (e.g., a GS linker) is positioned between the LLT1 and the tag. In several embodiments, the polynucleotide encoding LLT1 and GFP comprises SEQ ID NO: 776 or shares at least about 80%, at least about 85%, at least about 90%, at least about 94%, at least about 95%, at least about 96%, at least about 97%, at least about 98%, or at least about 99%, sequence identity with SEQ ID NO: 776. In several embodiments, the LLT1-GFP construct comprises the amino acid sequence of SEQ ID NO: 775 or an amino acid that shares at least about 80%, at least about 85%, at least about 90%, at least about 94%, at least about 95%, at least about 96%, at least about 97%, at least about 98%, or at least about 99%, sequence identity with SEQ ID NO: 775.

[0362] In several embodiments, there is provided a polynucleotide encoding at least a portion of the extracellular and transmembrane domains of CD47 (CD47tm162). In several embodiments, the CD47 domains are coupled to a CD8α signal peptide (e.g., for expression purposes, the sequence of which is provided for separately herein). In several embodiments, the CD47 immunosuppressive construct comprises a CD8α signal peptide and the CD47 extracellular and transmembrane domains (positions 19 to 162 of UniProtKB—Q08722) and is encoded by a polynucleotide that encodes an amino acid sequence comprising SEQ ID NO: 781. In several embodiments, the amino acid sequence shares at least about 90%, at least about 94%, at least about 95%, at least about 96%, at least about 97%, at least about 98%, or at least about 99%, sequence identity, homology and/or functional equivalence with SEQ ID NO: 781. In several embodiments, the polynucleotide comprises SEQ ID NO: 782 or shares at least about 80%, at least about 85%, at least about 90%, at least about 94%, at least about 95%, at least about 96%, at least about 97%, at least about 98%, or at least about 99%, sequence identity with SEQ ID NO: 782. Optionally, the polynucleotide encodes a detectable tag (e.g., a FLAG tag) and/or can comprise an internal ribosome entry site (IRES) that allows for expression of an additional protein, such as a detectable tag (e.g., GFP). In several embodiments, a linker (e.g., a GS linker) is positioned between the CD47 domains and the tag. In several embodiments, the polynucleotide encoding CD47 and GFP comprises SEQ ID NO: 780 or shares at least about 80%, at least about 85%, at least about 90%, at least about 94%, at least about 95%, at least about 96%, at least about 97%, at least about 98%, or at least about 99%, sequence identity with SEQ ID NO: 780. In several embodiments, the CD47tm162-GFP construct comprises the amino acid sequence of SEQ ID NO: 779 or an amino acid that shares at least about 80%, at least about 85%, at least about 90%, at least about 94%, at least about 95%, at least about 96%, at least about 97%, at least about 98%, or at least about 99%, sequence identity with SEQ ID NO: 779.

[0363] In several embodiments, there is provided a polynucleotide encoding at least a portion of the latent membrane protein (LMP) oncogene of the Epstein-Barr virus (LMP_L_CD8HTM). In several embodiments, the LMP domain is coupled to a CD8α signal peptide (e.g., for expression purposes, the sequence of which is provided for separately herein). In several embodiments, the LMP immunosuppressive construct comprises a CD8α signal peptide, the LMP_L domain, a CD8α hinge, and a CD8α transmembrane domain and is encoded by a polynucleotide that encodes an amino acid sequence comprising SEQ ID NO: 785. In several embodiments, the amino acid sequence shares at least about 90%, at least about 94%, at least about 95%, at least about 96%, at least about 97%, at least about 98%, or at least about 99%, sequence identity, homology and/or functional equivalence with SEQ ID NO: 785. In several embodiments, the polynucleotide comprises SEQ ID NO: 786 or shares at least about 80%, at least about 85%, at least about 90%, at least about 94%, at least about 95%, at least about 96%, at least about 97%, at least about 98%, or at least about 99%, sequence identity with SEQ ID NO: 786. Optionally, the polynucleotide encodes a detectable tag (e.g., a FLAG tag) and/or can comprise an internal ribosome entry site (IRES) that allows for expression of an additional protein, such as a detectable tag (e.g., GFP). In several embodiments, a linker (e.g., a GS linker) is positioned between the CD47 domains and the tag. In several embodiments, the polynucleotide encoding the LMP_L domain and GFP comprises SEQ ID NO: 784 or shares at least about 80%, at least about 85%, at least about 90%, at least about 94%, at least about 95%, at least about 96%, at least about 97%, at least about 98%, or at least about 99%, sequence identity with SEQ ID NO: 784. In several embodiments, the LMP_L_CD8HTM-GFP construct comprises the amino acid sequence of SEQ ID NO: 783 or an amino acid that shares at least about 80%, at least about 85%, at least about 90%, at least about 94%, at least about 95%, at least about 96%, at least about 97%, at least about 98%, or at least about 99%, sequence identity with SEQ ID NO: 783.

[0364] In several embodiments, there is provided a polynucleotide encoding a synthetic immunosuppressive construct comprising a multimeric repeat (e.g., dimer, trimer, quatramer, pentamer, etc.) of a peptide with immunosuppressive properties (LALLFWLx5-CD8HTM). In several embodiments, the synthetic domain is coupled to a CD8α signal peptide (e.g., for expression purposes, the sequence of which is provided for separately herein). In several embodiments, the synthetic immunosuppressive construct comprises a CD8α signal peptide, the five repeats of the synthetic peptide, a CD8α hinge, and a CD8α transmembrane domain and is encoded by a polynucleotide that encodes an amino acid sequence comprising SEQ ID NO: 789. In several embodiments, the amino acid sequence shares at least about 90%, at least about 94%, at least about 95%, at least about 96%, at least about 97%, at least about 98%, or at least about 99%, sequence identity, homology and/or functional equivalence with SEQ ID NO: 789. In several embodiments, the polynucleotide comprises SEQ ID NO: 790 or shares at least about 80%, at least about 85%, at least about 90%, at least about 94%, at least about 95%, at least about 96%, at least about 97%, at least about 98%, or at least about 99%, sequence identity with SEQ ID NO: 790. Optionally, the polynucleotide encodes a detectable tag (e.g., a FLAG tag) and/or can comprise an internal ribosome entry site (IRES) that allows for expression of an additional protein, such as a detectable tag (e.g., GFP). In several embodiments, a linker (e.g., a GS linker) is positioned between the transmembrane domain and the tag. In several embodiments, the polynucleotide encoding the synthetic immunosuppressive peptide and GFP comprises SEQ ID NO: 788 or shares at least about 80%, at least about 85%, at least about 90%, at least about 94%, at least about 95%, at least about 96%, at least about 97%, at least about 98%, or at least about 99%, sequence identity with SEQ ID NO: 788. In several embodiments, the synthetic immunosuppressive peptide-GFP construct comprises the amino acid sequence of SEQ ID NO: 787 or an amino acid that shares at least about 80%, at least about 85%, at least about 90%, at least about 94%, at least about 95%, at least about 96%, at least about 97%, at least about 98%, or at least about 99%, sequence identity with SEQ ID NO: 787.

[0365] In several embodiments, there is provided a polynucleotide encoding at least a portion of the N-terminal fusion peptide (FP) of the human immunodeficiency virus (HIV)-1 envelope glycoprotein (Env) gp41 (GP41fp). In several embodiments, the GP41fp is coupled to a CD8α signal peptide (e.g., for expression purposes, the sequence of which is provided for separately herein). In several embodiments, the GP41fp immunosuppressive construct comprises a CD8α signal peptide, the GP41fp peptide, and at least a portion of the GP41 transmembrane domain and is encoded by a polynucleotide that encodes an amino acid sequence comprising SEQ ID NO: 793. In several embodiments, the amino acid sequence shares at least about 90%, at least about 94%, at least about 95%, at least about 96%, at least about 97%, at least about 98%, or at least about 99%, sequence identity, homology and/or functional equivalence with SEQ ID NO: 793. In several embodiments, the polynucleotide comprises SEQ ID NO: 794 or shares at least about 80%, at least about 85%, at least about 90%, at least about 94%, at least about 95%, at least about 96%, at least about 97%, at least about 98%, or at least about 99%, sequence identity with SEQ ID NO: 794. Optionally, the polynucleotide encodes a detectable tag (e.g., a FLAG tag) and/or can comprise an internal ribosome entry site (IRES) that allows for expression of an additional protein, such as a detectable tag (e.g., GFP). In several embodiments, a linker (e.g., a GS linker) is positioned between the transmembrane domain and the tag. In several embodiments, the polynucleotide encoding the GP41fp and GFP comprises SEQ ID NO: 792 or shares at least about 80%, at least about 85%, at least about 90%, at least about 94%, at least about 95%, at least about 96%, at least about 97%, at least about 98%, or at least about 99%, sequence identity with SEQ ID NO: 792. In several embodiments, the GP41fp-GFP construct comprises the amino acid sequence of SEQ ID NO: 791 or an amino acid that shares at least about 80%, at least about 85%, at least about 90%, at least about 94%, at least about 95%, at least about 96%, at least about 97%, at least about 98%, or at least about 99%, sequence identity with SEQ ID NO: 791.

[0366] In several embodiments, there is provided a polynucleotide encoding a CKS-17 viral immunosuppressive peptide. In several embodiments, provided for is a membrane-bound CKS-17 viral immunosuppressive peptide. In several embodiments, the CKS-17 viral immunosuppressive peptide is coupled to a CD8α transmembrane protein and/or CD8α hinge domain. In several embodiments, the membrane-bound CKS-17 viral immunosuppressive peptide construct comprises one or more linker sequences. In several embodiments, the membrane-bound CKS-17 viral immunosuppressive peptide comprises a CD8α signal peptide, synthetic CKS-17, a CD8α hinge, and a CD8α transmembrane domain. In several embodiments, the membrane-bound CKS-17 viral immunosuppressive peptide construct is encoded by a polynucleotide that encodes an amino acid sequence comprising SEQ ID NO: 797. In several embodiments, the polynucleotide encodes a sequence that shares at least about 80%, at least about 85%, at least about 90%, at least about 94%, at least about 95%, at least about 96%, at least about 97%, at least about 98%, or at least about 99%, sequence identity, homology and/or functional equivalence with SEQ ID NO: 797. In several embodiments, the polynucleotide comprises SEQ ID NO: 798 or shares at least about 80%, at least about 85%, at least about 90%, at least about 94%, at least about 95%, at least about 96%, at least about 97%, at least about 98%, or at least about 99%, sequence identity with SEQ ID NO: 798. Optionally, the polynucleotide encodes a detectable tag (e.g., a FLAG tag) and/or can comprise an internal ribosome entry site (IRES) that allows for expression of an additional protein, such as a detectable tag (e.g., GFP). In several embodiments, the polynucleotide encoding membrane-bound synthetic CKS-17 and GFP comprises SEQ ID NO: 796 or shares at least about 80%, at least about 85%, at least about 90%, at least about 94%, at least about 95%, at least about 96%, at least about 97%, at least about 98%, or at least about 99%, sequence identity with SEQ ID NO: 796. In several embodiments, the membrane-bound synthetic CKS-17-GFP construct comprises SEQ ID NO: 795 or shares at least about 80%, at least about 85%, at least about 90%, at least about 94%, at least about 95%, at least about 96%, at least about 97%, at least about 98%, or at least about 99%, sequence identity with SEQ ID NO: 795.

[0367] In several embodiments, there is provided a polynucleotide encoding a chimeric immunosuppressive construct comprising a CKS-17 domain and an HTLV-1 (Gp21) domain. In several embodiments, provided for is a membrane-bound immunosuppressive construct comprising a CKS-17 domain and a an HTLV-1 (Gp21) domain (CKS_HTLV-8aTM). In several embodiments, the CKS_HTLV immunosuppressive peptide is coupled to a CD8α transmembrane protein and/or CD8α hinge domain. In several embodiments, the membrane-bound CKS_HTLV viral immunosuppressive peptide construct comprises one or more linker sequences. In several embodiments, the membrane-bound CKS_HTLV viral immunosuppressive peptide comprises a CD8α signal peptide, a CKS-17 peptide, an HTLV(Gp21) peptide, a CD8α hinge, and a CD8α transmembrane domain. In several embodiments, the membrane-bound CKS_HTLV immunosuppressive peptide construct is encoded by a polynucleotide that encodes an amino acid sequence comprising SEQ ID NO: 801. In several embodiments, the polynucleotide encodes a sequence that shares at least about 80%, at least about 85%, at least about 90%, at least about 94%, at least about 95%, at least about 96%, at least about 97%, at least about 98%, or at least about 99%, sequence identity, homology and/or functional equivalence with SEQ ID NO: 801. In several embodiments, the polynucleotide comprises SEQ ID NO: 802 or shares at least about 80%, at least about 85%, at least about 90%, at least about 94%, at least about 95%, at least about 96%, at least about 97%, at least about 98%, or at least about 99%, sequence identity with SEQ ID NO: 802. Optionally, the polynucleotide encodes a detectable tag (e.g., a FLAG tag) and/or can comprise an internal ribosome entry site (IRES) that allows for expression of an additional protein, such as a detectable tag (e.g., GFP). In several embodiments, the polynucleotide encoding membrane-bound CKS_HTLV and GFP comprises SEQ ID NO: 800 or shares at least about 80%, at least about 85%, at least about 90%, at least about 94%, at least about 95%, at least about 96%, at least about 97%, at least about 98%, or at least about 99%, sequence identity with SEQ ID NO: 800. In several embodiments, the membrane-bound CKS_HTLV-GFP construct comprises an amino acid sequence of SEQ ID NO: 799 or an amino acid that shares at least about 80%, at least about 85%, at least about 90%, at least about 94%, at least about 95%, at least about 96%, at least about 97%, at least about 98%, or at least about 99%, sequence identity with SEQ ID NO: 799.

[0368] In several embodiments, there is provided a polynucleotide encoding a chimeric immunosuppressive construct comprising a CKS-17 domain and an LMP domain. In several embodiments, provided for is a membrane-bound immunosuppressive construct comprising a CKS-17 domain and a an LMP domain (CKS_LMP-8aTM). In several embodiments, the CKS_LMP immunosuppressive peptide is coupled to a CD8α transmembrane protein and/or CD8α hinge domain. In several embodiments, the membrane-bound CKS_LMP viral immunosuppressive peptide construct comprises one or more linker sequences. In several embodiments, the membrane-bound CKS_LMP viral immunosuppressive construct comprises a CD8α signal peptide, a CKS-17 peptide, an LMP peptide, a CD8α hinge, and a CD8αtransmembrane domain. In several embodiments, the membrane-bound CKS_LMP immunosuppressive construct is encoded by a polynucleotide that encodes an amino acid sequence comprising SEQ ID NO: 805. In several embodiments, the polynucleotide encodes a sequence that shares at least about 80%, at least about 85%, at least about 90%, at least about 94%, at least about 95%, at least about 96%, at least about 97%, at least about 98%, or at least about 99%, sequence identity, homology and/or functional equivalence with SEQ ID NO: 805. In several embodiments, the polynucleotide comprises SEQ ID NO: 806 or shares at least about 80%, at least about 85%, at least about 90%, at least about 94%, at least about 95%, at least about 96%, at least about 97%, at least about 98%, or at least about 99%, sequence identity with SEQ ID NO: 806. Optionally, the polynucleotide encodes a detectable tag (e.g., a FLAG tag) and/or can comprise an internal ribosome entry site (IRES) that allows for expression of an additional protein, such as a detectable tag (e.g., GFP). In several embodiments, the polynucleotide encoding membrane-bound CKS_LMP and GFP comprises SEQ ID NO: 804 or shares at least about 80%, at least about 85%, at least about 90%, at least about 94%, at least about 95%, at least about 96%, at least about 97%, at least about 98%, or at least about 99%, sequence identity with SEQ ID NO: 804. In several embodiments, the membrane-bound CKS_LMP-GFP construct comprises an amino acid sequence of SEQ ID NO: 803 or an amino acid that shares at least about 80%, at least about 85%, at least about 90%, at least about 94%, at least about 95%, at least about 96%, at least about 97%, at least about 98%, or at least about 99%, sequence identity with SEQ ID NO: 803.

[0369] In several embodiments, there is provided a polynucleotide encoding a chimeric immunosuppressive construct comprising a CKS-17 domain and a GP41fp domain. In several embodiments, provided for is a membrane-bound immunosuppressive construct comprising a CKS-17 domain and an GP41fp domain (CKS_GP41fptm). In several embodiments, the membrane-bound CKS_GP41fptm viral immunosuppressive peptide construct comprises one or more linker sequences. In several embodiments, the membrane-bound CKS_GP41fptm viral immunosuppressive construct comprises a CD8α signal peptide, a first portion of the GP41fp (amino acids 1-16), a CKS-17 peptide, a second portion of the GP41fp (amino acids 17-70), and a gp41 transmembrane domain. In several embodiments, the membrane-bound CKS_GP41fptm immunosuppressive construct is encoded by a polynucleotide that encodes an amino acid sequence comprising SEQ ID NO: 809. In several embodiments, the polynucleotide encodes a sequence that shares at least about 80%, at least about 85%, at least about 90%, at least about 94%, at least about 95%, at least about 96%, at least about 97%, at least about 98%, or at least about 99%, sequence identity, homology and/or functional equivalence with SEQ ID NO: 809. In several embodiments, the polynucleotide comprises SEQ ID NO: 810 or shares at least about 80%, at least about 85%, at least about 90%, at least about 94%, at least about 95%, at least about 96%, at least about 97%, at least about 98%, or at least about 99%, sequence identity with SEQ ID NO: 810. Optionally, the polynucleotide encodes a detectable tag (e.g., a FLAG tag) and/or can comprise an internal ribosome entry site (IRES) that allows for expression of an additional protein, such as a detectable tag (e.g., GFP). In several embodiments, the polynucleotide encoding membrane-bound CKS_GP41fptm and GFP comprises SEQ ID NO: 808 or shares at least about 80%, at least about 85%, at least about 90%, at least about 94%, at least about 95%, at least about 96%, at least about 97%, at least about 98%, or at least about 99%, sequence identity with SEQ ID NO: 808. In several embodiments, the membrane-bound CKS_GP41fptm-GFP construct comprises an amino acid sequence of SEQ ID NO: 807 or an amino acid that shares at least about 80%, at least about 85%, at least about 90%, at least about 94%, at least about 95%, at least about 96%, at least about 97%, at least about 98%, or at least about 99%, sequence identity with SEQ ID NO: 807.

[0370] In several embodiments, there is provided a polynucleotide encoding a truncated portion of the latent membrane protein 1 (LMP1) peptide of the Epstein-Barr Virus (LMP_S). In several embodiments, the LMP_S peptide is coupled to a CD8α signal peptide (e.g., for expression purposes, the sequence of which is provided for separately herein). In several embodiments, provided for is a membrane-bound LMP_S immunosuppressive construct comprising an LMP_S peptide coupled to a CD8αtransmembrane protein and/or CD8α hinge domain. In several embodiments, the membrane-bound LMP_S immunosuppressive construct comprises one or more linker sequences. In several embodiments, the membrane-bound LMP_S immunosuppressive construct comprises a CD8α signal peptide, an LMP_S peptide, an HTLV(Gp21) peptide, a CD8α hinge, and a CD8α transmembrane domain and is encoded by a polynucleotide that encodes an amino acid sequence comprising SEQ ID NO: 813. In several embodiments, the amino acid sequence shares at least about 90%, at least about 94%, at least about 95%, at least about 96%, at least about 97%, at least about 98%, or at least about 99%, sequence identity, homology and/or functional equivalence with SEQ ID NO: 813. In several embodiments, the polynucleotide comprises SEQ ID NO: 814 or shares at least about 80%, at least about 85%, at least about 90%, at least about 94%, at least about 95%, at least about 96%, at least about 97%, at least about 98%, or at least about 99%, sequence identity with SEQ ID NO: 814. Optionally, the polynucleotide encodes a detectable tag (e.g., a FLAG tag) and/or can comprise an internal ribosome entry site (IRES) that allows for expression of an additional protein, such as a detectable tag (e.g., GFP). In several embodiments, a linker (e.g., a GS linker) is positioned between the LMP_S and the tag. In several embodiments, the polynucleotide encoding LMP_S and GFP comprises SEQ ID NO: 812 or shares at least about 80%, at least about 85%, at least about 90%, at least about 94%, at least about 95%, at least about 96%, at least about 97%, at least about 98%, or at least about 99%, sequence identity with SEQ ID NO: 812. In several embodiments, the LMP_S-GFP construct comprises the amino acid sequence of SEQ ID NO: 811 or an amino acid that shares at least about 80%, at least about 85%, at least about 90%, at least about 94%, at least about 95%, at least about 96%, at least about 97%, at least about 98%, or at least about 99%, sequence identity with SEQ ID NO: 811.

[0371] In several embodiments, there is provided a polynucleotide encoding a chimeric immunosuppressive construct comprising at least a portion of the latent membrane protein 1 (LMP1) peptide of the Epstein-Barr Virus (LMP_L) coupled with at least a portion of the extracellular and transmembrane domains of CD47 (CD47tm162), together referred to as LMP_CD47tm162. In several embodiments, the LMP_CD47tm162 is coupled to a CD8α signal peptide (e.g., for expression purposes, the sequence of which is provided for separately herein). In several embodiments, the LMP_CD47tm162 construct is membrane-bound based on the portion of the CD47 transmembrane domain and comprises one or more linker sequences. In several embodiments, the membrane-bound LMP_CD47tm162 immunosuppressive construct comprises a CD8α signal peptide, an LMP_L peptide, and a CD47tm162 peptide, and is encoded by a polynucleotide that encodes an amino acid sequence comprising SEQ ID NO: 817. In several embodiments, the amino acid sequence shares at least about 90%, at least about 94%, at least about 95%, at least about 96%, at least about 97%, at least about 98%, or at least about 99%, sequence identity, homology and/or functional equivalence with SEQ ID NO: 817. In several embodiments, the polynucleotide comprises SEQ ID NO: 818 or shares at least about 80%, at least about 85%, at least about 90%, at least about 94%, at least about 95%, at least about 96%, at least about 97%, at least about 98%, or at least about 99%, sequence identity with SEQ ID NO: 818. Optionally, the polynucleotide encodes a detectable tag (e.g., a FLAG tag) and/or can comprise an internal ribosome entry site (IRES) that allows for expression of an additional protein, such as a detectable tag (e.g., GFP). In several embodiments, a linker (e.g., a GS linker) is positioned between the LMP_CD47tm162 and the tag. In several embodiments, the polynucleotide encoding LMP_CD47tm162 and GFP comprises SEQ ID NO: 816 or shares at least about 80%, at least about 85%, at least about 90%, at least about 94%, at least about 95%, at least about 96%, at least about 97%, at least about 98%, or at least about 99%, sequence identity with SEQ ID NO: 816. In several embodiments, the LMP_CD47tm162-GFP construct comprises the amino acid sequence of SEQ ID NO: 815 or an amino acid that shares at least about 80%, at least about 85%, at least about 90%, at least about 94%, at least about 95%, at least about 96%, at least about 97%, at least about 98%, or at least about 99%, sequence identity with SEQ ID NO: 815.

[0372] In several embodiments, there is provided a polynucleotide encoding a chimeric immunosuppressive construct comprising at least a portion of a p15E viral peptide coupled with at least a portion of the extracellular and transmembrane domains of CD47 (CD47tm162), together referred to as p15E_CD47tm162. In several embodiments, the p15E_CD47tm162 is coupled to a CD8α signal peptide (e.g., for expression purposes, the sequence of which is provided for separately herein). In several embodiments, the p15E_CD47tm162 construct is membrane-bound based on the portion of the CD47 transmembrane domain and comprises one or more linker sequences. In several embodiments, the membrane-bound p15E_CD47tm162 immunosuppressive construct comprises a CD8α signal peptide, a p15E peptide, and a CD47tm162 peptide, and is encoded by a polynucleotide that encodes an amino acid sequence comprising SEQ ID NO: 821. In several embodiments, the amino acid sequence shares at least about 90%, at least about 94%, at least about 95%, at least about 96%, at least about 97%, at least about 98%, or at least about 99%, sequence identity, homology and/or functional equivalence with SEQ ID NO: 821. In several embodiments, the polynucleotide comprises SEQ ID NO: 822 or shares at least about 80%, at least about 85%, at least about 90%, at least about 94%, at least about 95%, at least about 96%, at least about 97%, at least about 98%, or at least about 99%, sequence identity with SEQ ID NO: 822. Optionally, the polynucleotide encodes a detectable tag (e.g., a FLAG tag) and/or can comprise an internal ribosome entry site (IRES) that allows for expression of an additional protein, such as a detectable tag (e.g., GFP). In several embodiments, a linker (e.g., a GS linker) is positioned between the p15E_CD47tm162 and the tag. In several embodiments, the polynucleotide encoding p15E_CD47tm162 and GFP comprises SEQ ID NO: 820 or shares at least about 80%, at least about 85%, at least about 90%, at least about 94%, at least about 95%, at least about 96%, at least about 97%, at least about 98%, or at least about 99%, sequence identity with SEQ ID NO: 820. In several embodiments, the p15E_CD47tm162-GFP construct comprises the amino acid sequence of SEQ ID NO: 819 or an amino acid that shares at least about 80%, at least about 85%, at least about 90%, at least about 94%, at least about 95%, at least about 96%, at least about 97%, at least about 98%, or at least about 99%, sequence identity with SEQ ID NO: 819.

[0373] In several embodiments, there is provided a polynucleotide encoding a chimeric immunosuppressive construct comprising at least one domain derived from HIV Gp41 and at least one domain from CD47 (CD47_GP41fptm). In several embodiments, the CD47_GP41fptm is coupled to a CD8α signal peptide (e.g., for expression purposes, the sequence of which is provided for separately herein). In several embodiments, the CD47_GP41fptm construct is membrane-bound based on a gp41 transmembrane domain. In several embodiments, the membrane-bound CD47_GP41fptm immunosuppressive construct comprises a CD8α signal peptide, a first GP41 domain (amino acids 1-16 of the extracellular domain), a CD47 domain (amino acids 2-141), a second GP41 domain (amino acids 17-70 of the extracellular domain), and a GP41 transmembrane domain and is encoded by a polynucleotide that encodes an amino acid sequence comprising SEQ ID NO: 825. In several embodiments, the amino acid sequence shares at least about 90%, at least about 94%, at least about 95%, at least about 96%, at least about 97%, at least about 98%, or at least about 99%, sequence identity, homology and/or functional equivalence with SEQ ID NO: 825. In several embodiments, the polynucleotide comprises SEQ ID NO: 826 or shares at least about 80%, at least about 85%, at least about 90%, at least about 94%, at least about 95%, at least about 96%, at least about 97%, at least about 98%, or at least about 99%, sequence identity with SEQ ID NO: 826. Optionally, the polynucleotide encodes a detectable tag (e.g., a FLAG tag) and/or can comprise an internal ribosome entry site (IRES) that allows for expression of an additional protein, such as a detectable tag (e.g., GFP). In several embodiments, a linker (e.g., a GS linker) is positioned between the CD47_GP41fptm and the tag. In several embodiments, the polynucleotide encoding CD47_GP41fptm and GFP comprises SEQ ID NO: 824 or shares at least about 80%, at least about 85%, at least about 90%, at least about 94%, at least about 95%, at least about 96%, at least about 97%, at least about 98%, or at least about 99%, sequence identity with SEQ ID NO: 824. In several embodiments, the CD47_GP41fptm-GFP construct comprises the amino acid sequence of SEQ ID NO: 823 or an amino acid that shares at least about 80%, at least about 85%, at least about 90%, at least about 94%, at least about 95%, at least about 96%, at least about 97%, at least about 98%, or at least about 99%, sequence identity with SEQ ID NO: 823.

[0374] In several embodiments, there is provided a polynucleotide encoding an immunosuppressive construct comprising at least a portion of an antibody that targets a signal-regulatory protein α (SIRPα) (anti-SIRPa agonist_vHL), which is an innate immune checkpoint expressed on dendritic cells, macrophages, monocytes and neutrophils. In several embodiments, the constructs are engineered to be membrane-bound. In several embodiments, the anti-SIRPa agonist_vHL is coupled to a CD8α signal peptide (e.g., for expression purposes, the sequence of which is provided for separately herein). In several embodiments, the anti-SIRPa agonist_vHL construct is membrane-bound based on a CD8α hinge region and/or a CD8α transmembrane domain. In several embodiments, the membrane-bound anti-SIRPa agonist_vHL immunosuppressive construct comprises a CD8α signal peptide, an anti-SIRPa heavy chain, a linker and anti-SIRPa light chain, a CD8α hinge region and, a CD8α transmembrane domain and is encoded by a polynucleotide that encodes an amino acid sequence comprising SEQ ID NO: 833. In several embodiments, the amino acid sequence shares at least about 90%, at least about 94%, at least about 95%, at least about 96%, at least about 97%, at least about 98%, or at least about 99%, sequence identity, homology and/or functional equivalence with SEQ ID NO: 833. In several embodiments, the polynucleotide comprises SEQ ID NO: 834 or shares at least about 80%, at least about 85%, at least about 90%, at least about 94%, at least about 95%, at least about 96%, at least about 97%, at least about 98%, or at least about 99%, sequence identity with SEQ ID NO: 834. Optionally, the polynucleotide encodes a detectable tag (e.g., a FLAG tag) and/or can comprise an internal ribosome entry site (IRES) that allows for expression of an additional protein, such as a detectable tag (e.g., GFP). In several embodiments, a linker (e.g., a GS linker) is positioned between the anti-SIRPa agonist_vHL and the tag. In several embodiments, the polynucleotide encoding anti-SIRPa agonist_vHL and GFP comprises SEQ ID NO: 832 or shares at least about 80%, at least about 85%, at least about 90%, at least about 94%, at least about 95%, at least about 96%, at least about 97%, at least about 98%, or at least about 99%, sequence identity with SEQ ID NO: 832. In several embodiments, the anti-SIRPa agonist_vHL-GFP construct comprises the amino acid sequence of SEQ ID NO: 831 or an amino acid that shares at least about 80%, at least about 85%, at least about 90%, at least about 94%, at least about 95%, at least about 96%, at least about 97%, at least about 98%, or at least about 99%, sequence identity with SEQ ID NO: 831.

[0375] In several embodiments, there is provided a polynucleotide encoding an immunosuppressive construct comprising at least one domain derived from HTLV GP21 (HTLV1_GP21). In several embodiments, the HTLV1_GP21 is coupled to a CD8α signal peptide (e.g., for expression purposes, the sequence of which is provided for separately herein). In several embodiments, the HTLV1_GP21 comprises a CD8α signal peptide and a GP21 transmembrane domain and is encoded by a polynucleotide that encodes an amino acid sequence comprising SEQ ID NO: 841. In several embodiments, the amino acid sequence shares at least about 90%, at least about 94%, at least about 95%, at least about 96%, at least about 97%, at least about 98%, or at least about 99%, sequence identity, homology and/or functional equivalence with SEQ ID NO: 841. In several embodiments, the polynucleotide comprises SEQ ID NO: 842 or shares at least about 80%, at least about 85%, at least about 90%, at least about 94%, at least about 95%, at least about 96%, at least about 97%, at least about 98%, or at least about 99%, sequence identity with SEQ ID NO: 842. Optionally, the polynucleotide encodes a detectable tag (e.g., a FLAG tag) and/or can comprise an internal ribosome entry site (IRES) that allows for expression of an additional protein, such as a detectable tag (e.g., GFP). In several embodiments, a linker (e.g., a GS linker) is positioned between the HTLV1_GP21 and the tag. In several embodiments, the polynucleotide encoding HTLV1_GP21 and GFP comprises SEQ ID NO: 840 or shares at least about 80%, at least about 85%, at least about 90%, at least about 94%, at least about 95%, at least about 96%, at least about 97%, at least about 98%, or at least about 99%, sequence identity with SEQ ID NO: 840. In several embodiments, the HTLV1_fGP62-GFP construct comprises the amino acid sequence of SEQ ID NO: 839 or an amino acid that shares at least about 80%, at least about 85%, at least about 90%, at least about 94%, at least about 95%, at least about 96%, at least about 97%, at least about 98%, or at least about 99%, sequence identity with SEQ ID NO: 839.

[0376] In several embodiments, there is provided a polynucleotide encoding an immunosuppressive construct comprising at least one domain derived from a Lassa virus membrane glycoprotein 2 (LASV_fGP2). In several embodiments, the LASV_fGP2 is coupled to a CD8α signal peptide (e.g., for expression purposes, the sequence of which is provided for separately herein). In several embodiments, the LASV_fGP2 comprises a CD8α signal peptide and at least a portion of a Lassa Virus GP2 domain, including a transmembrane region and is encoded by a polynucleotide that encodes an amino acid sequence comprising SEQ ID NO: 845. In several embodiments, the amino acid sequence shares at least about 90%, at least about 94%, at least about 95%, at least about 96%, at least about 97%, at least about 98%, or at least about 99%, sequence identity, homology and/or functional equivalence with SEQ ID NO: 845. In several embodiments, the polynucleotide comprises SEQ ID NO: 846 or shares at least about 80%, at least about 85%, at least about 90%, at least about 94%, at least about 95%, at least about 96%, at least about 97%, at least about 98%, or at least about 99%, sequence identity with SEQ ID NO: 846. Optionally, the polynucleotide encodes a detectable tag (e.g., a FLAG tag) and/or can comprise an internal ribosome entry site (IRES) that allows for expression of an additional protein, such as a detectable tag (e.g., GFP). In several embodiments, a linker (e.g., a GS linker) is positioned between the HTLV1_GP21 and the tag. In several embodiments, the polynucleotide encoding LASV_fGP2 and GFP comprises SEQ ID NO: 844 or shares at least about 80%, at least about 85%, at least about 90%, at least about 94%, at least about 95%, at least about 96%, at least about 97%, at least about 98%, or at least about 99%, sequence identity with SEQ ID NO: 844. In several embodiments, the LASV_fGP2-GFP construct comprises the amino acid sequence of SEQ ID NO: 843 or an amino acid that shares at least about 80%, at least about 85%, at least about 90%, at least about 94%, at least about 95%, at least about 96%, at least about 97%, at least about 98%, or at least about 99%, sequence identity with SEQ ID NO: 843.

[0377] In several embodiments, there is provided a polynucleotide encoding an immunosuppressive construct comprising at least one domain derived from a Sudan ebolavirus envelope glycoprotein (SEBOV_fGP). In several embodiments, the SEBOV_fGP is coupled to a CD8α signal peptide (e.g., for expression purposes, the sequence of which is provided for separately herein). In several embodiments, the SEBOV_fGP comprises a CD8α signal peptide and at least two domains from the ebolavirus envelope. In several embodiments, the SEBOV_fGP comprises a full GP1 glycoprotein sequence followed by a truncated form of GP1 (known as GP2, resulting from proteolysis of the GP1 domain). In several embodiments, the GP2 domain includes a transmembrane domain. In several embodiments, the SEBOV_fGP is encoded by a polynucleotide that encodes an amino acid sequence comprising SEQ ID NO: 849. In several embodiments, the amino acid sequence shares at least about 90%, at least about 94%, at least about 95%, at least about 96%, at least about 97%, at least about 98%, or at least about 99%, sequence identity, homology and/or functional equivalence with SEQ ID NO: 849. In several embodiments, the polynucleotide comprises SEQ ID NO: 850 or shares at least about 80%, at least about 85%, at least about 90%, at least about 94%, at least about 95%, at least about 96%, at least about 97%, at least about 98%, or at least about 99%, sequence identity with SEQ ID NO: 850. Optionally, the polynucleotide encodes a detectable tag (e.g., a FLAG tag) and/or can comprise an internal ribosome entry site (IRES) that allows for expression of an additional protein, such as a detectable tag (e.g., GFP). In several embodiments, a linker (e.g., a GS linker) is positioned between the SEBOV_fGP and the tag. In several embodiments, the polynucleotide encoding SEBOV_fGP and GFP comprises SEQ ID NO: 848 or shares at least about 80%, at least about 85%, at least about 90%, at least about 94%, at least about 95%, at least about 96%, at least about 97%, at least about 98%, or at least about 99%, sequence identity with SEQ ID NO: 848. In several embodiments, the SEBOV_fGP-GFP construct comprises the amino acid sequence of SEQ ID NO: 847 or an amino acid that shares at least about 80%, at least about 85%, at least about 90%, at least about 94%, at least about 95%, at least about 96%, at least about 97%, at least about 98%, or at least about 99%, sequence identity with SEQ ID NO: 847.

[0378] In several embodiments, there is provided a polynucleotide encoding an immunosuppressive construct comprising at least one domain derived from a Sudan ebolavirus envelope glycoprotein (SEBOV_GP2). In several embodiments, the SEBOV_GP2 is coupled to a CD8α signal peptide (e.g., for expression purposes, the sequence of which is provided for separately herein). In several embodiments, the SEBOV_GP2 comprises a CD8α signal peptide and a GP2 domain, resulting from proteolysis of the GP1 domain. In several embodiments, the GP2 domain includes a transmembrane domain. In several embodiments, the SEBOV_GP2 is encoded by a polynucleotide that encodes an amino acid sequence comprising SEQ ID NO: 853. In several embodiments, the amino acid sequence shares at least about 90%, at least about 94%, at least about 95%, at least about 96%, at least about 97%, at least about 98%, or at least about 99%, sequence identity, homology and/or functional equivalence with SEQ ID NO: 853. In several embodiments, the polynucleotide comprises SEQ ID NO: 854 or shares at least about 80%, at least about 85%, at least about 90%, at least about 94%, at least about 95%, at least about 96%, at least about 97%, at least about 98%, or at least about 99%, sequence identity with SEQ ID NO: 854. Optionally, the polynucleotide encodes a detectable tag (e.g., a FLAG tag) and/or can comprise an internal ribosome entry site (IRES) that allows for expression of an additional protein, such as a detectable tag (e.g., GFP). In several embodiments, a linker (e.g., a GS linker) is positioned between the SEBOV_GP2 and the tag. In several embodiments, the polynucleotide encoding SEBOV_GP2 and GFP comprises SEQ ID NO: 852 or shares at least about 80%, at least about 85%, at least about 90%, at least about 94%, at least about 95%, at least about 96%, at least about 97%, at least about 98%, or at least about 99%, sequence identity with SEQ ID NO: 852. In several embodiments, the SEBOV_GP2-GFP construct comprises the amino acid sequence of SEQ ID NO: 851 or an amino acid that shares at least about 80%, at least about 85%, at least about 90%, at least about 94%, at least about 95%, at least about 96%, at least about 97%, at least about 98%, or at least about 99%, sequence identity with SEQ ID NO: 851.

[0379] In several embodiments, there is provided a polynucleotide encoding an immunosuppressive construct comprising at least one domain derived from a Sars-CoV-2 spike protein (SCoV_S2). In several embodiments, the SCoV_S2 is coupled to a CD8α signal peptide (e.g., for expression purposes, the sequence of which is provided for separately herein). In several embodiments, the SCoV_S2 comprises a CD8α signal peptide and a an S2 spike protein, including a transmembrane domain. In several embodiments, the SCoV_S2 is encoded by a polynucleotide that encodes an amino acid sequence comprising SEQ ID NO: 857. In several embodiments, the amino acid sequence shares at least about 90%, at least about 94%, at least about 95%, at least about 96%, at least about 97%, at least about 98%, or at least about 99%, sequence identity, homology and/or functional equivalence with SEQ ID NO: 857. In several embodiments, the polynucleotide comprises SEQ ID NO: 858 or shares at least about 80%, at least about 85%, at least about 90%, at least about 94%, at least about 95%, at least about 96%, at least about 97%, at least about 98%, or at least about 99%, sequence identity with SEQ ID NO: 858. Optionally, the polynucleotide encodes a detectable tag (e.g., a FLAG tag) and/or can comprise an internal ribosome entry site (IRES) that allows for expression of an additional protein, such as a detectable tag (e.g., GFP). In several embodiments, a linker (e.g., a GS linker) is positioned between the SCoV_S2 and the tag. In several embodiments, the polynucleotide encoding SCoV_S2and GFP comprises SEQ ID NO: 856 or shares at least about 80%, at least about 85%, at least about 90%, at least about 94%, at least about 95%, at least about 96%, at least about 97%, at least about 98%, or at least about 99%, sequence identity with SEQ ID NO: 856. In several embodiments, the SCoV_S2-GFP construct comprises the amino acid sequence of SEQ ID NO: 855 or an amino acid that shares at least about 80%, at least about 85%, at least about 90%, at least about 94%, at least about 95%, at least about 96%, at least about 97%, at least about 98%, or at least about 99%, sequence identity with SEQ ID NO: 855.

[0380] In several embodiments, there is provided a polynucleotide encoding an immunosuppressive construct comprising at least a portion of a Galectin-3-binding protein (LGALS3BP). In several embodiments, the constructs are engineered to be membrane-bound. In several embodiments, the LGALS3BP is coupled to a CD8α signal peptide (e.g., for expression purposes, the sequence of which is provided for separately herein). In several embodiments, LGALS3BP construct is membrane-bound based on a CD8α hinge region and/or a CD8α transmembrane domain. In several embodiments, the membrane-bound LGALS3BP immunosuppressive construct comprises a CD8α signal peptide, a Galectin 3 binding protein, and a CD8α transmembrane domain and is encoded by a polynucleotide that encodes an amino acid sequence comprising SEQ ID NO: 861. In several embodiments, the amino acid sequence shares at least about 90%, at least about 94%, at least about 95%, at least about 96%, at least about 97%, at least about 98%, or at least about 99%, sequence identity, homology and/or functional equivalence with SEQ ID NO: 861. In several embodiments, the polynucleotide comprises SEQ ID NO: 862 or shares at least about 80%, at least about 85%, at least about 90%, at least about 94%, at least about 95%, at least about 96%, at least about 97%, at least about 98%, or at least about 99%, sequence identity with SEQ ID NO: 862. Optionally, the polynucleotide encodes a detectable tag (e.g., a FLAG tag) and/or can comprise an internal ribosome entry site (IRES) that allows for expression of an additional protein, such as a detectable tag (e.g., GFP). In several embodiments, a linker (e.g., a GS linker) is positioned between the LGALS3BP and the tag. In several embodiments, the polynucleotide encoding LGALS3BP and GFP comprises SEQ ID NO: 860 or shares at least about 80%, at least about 85%, at least about 90%, at least about 94%, at least about 95%, at least about 96%, at least about 97%, at least about 98%, or at least about 99%, sequence identity with SEQ ID NO: 860. In several embodiments, the LGALS3BP-GFP construct comprises the amino acid sequence of SEQ ID NO: 859 or an amino acid that shares at least about 80%, at least about 85%, at least about 90%, at least about 94%, at least about 95%, at least about 96%, at least about 97%, at least about 98%, or at least about 99%, sequence identity with SEQ ID NO: 859.

[0381] In several embodiments, there is provided a polynucleotide encoding an immunosuppressive construct comprising at least a portion of CD24. In several embodiments, the constructs are engineered to be membrane-bound. In several embodiments, the CD24 construct comprises a CD24 signal peptide and a CD24 protein and is encoded by a polynucleotide that encodes an amino acid sequence comprising SEQ ID NO: 865. In several embodiments, the amino acid sequence shares at least about 90%, at least about 94%, at least about 95%, at least about 96%, at least about 97%, at least about 98%, or at least about 99%, sequence identity, homology and/or functional equivalence with SEQ ID NO: 865. In several embodiments, the polynucleotide comprises SEQ ID NO: 866 or shares at least about 80%, at least about 85%, at least about 90%, at least about 94%, at least about 95%, at least about 96%, at least about 97%, at least about 98%, or at least about 99%, sequence identity with SEQ ID NO: 866. Optionally, the polynucleotide encodes a detectable tag (e.g., a FLAG tag) and/or can comprise an internal ribosome entry site (IRES) that allows for expression of an additional protein, such as a detectable tag (e.g., GFP). In several embodiments, a T2A domain is positioned between the CD24 and the tag. In several embodiments, the polynucleotide encoding CD24 and GFP comprises SEQ ID NO: 864 or shares at least about 80%, at least about 85%, at least about 90%, at least about 94%, at least about 95%, at least about 96%, at least about 97%, at least about 98%, or at least about 99%, sequence identity with SEQ ID NO: 864. In several embodiments, the CD24-GFP construct comprises the amino acid sequence of SEQ ID NO: 863 or an amino acid that shares at least about 80%, at least about 85%, at least about 90%, at least about 94%, at least about 95%, at least about 96%, at least about 97%, at least about 98%, or at least about 99%, sequence identity with SEQ ID NO: 863.

[0382] In several embodiments, there is provided a polynucleotide encoding an immunosuppressive construct comprising at least a portion of a Hepatitis C envelope glycoprotein (HCV_E2). In several embodiments, the HCV_E2 is coupled to a CD8α signal peptide (e.g., for expression purposes, the sequence of which is provided for separately herein). In several embodiments, the HCV_E2 immunosuppressive construct comprises a CD8α signal peptide, and a E2 protein of HCV and is encoded by a polynucleotide that encodes an amino acid sequence comprising SEQ ID NO: 869. In several embodiments, the amino acid sequence shares at least about 90%, at least about 94%, at least about 95%, at least about 96%, at least about 97%, at least about 98%, or at least about 99%, sequence identity, homology and/or functional equivalence with SEQ ID NO: 869. In several embodiments, the polynucleotide comprises SEQ ID NO: 870 or shares at least about 80%, at least about 85%, at least about 90%, at least about 94%, at least about 95%, at least about 96%, at least about 97%, at least about 98%, or at least about 99%, sequence identity with SEQ ID NO: 870. Optionally, the polynucleotide encodes a detectable tag (e.g., a FLAG tag) and/or can comprise an internal ribosome entry site (IRES) that allows for expression of an additional protein, such as a detectable tag (e.g., GFP). In several embodiments, a linker (e.g., a GS linker) is positioned between the HCV_E2 and the tag. In several embodiments, the polynucleotide encoding HCV_E2 and GFP comprises SEQ ID NO: 868 or shares at least about 80%, at least about 85%, at least about 90%, at least about 94%, at least about 95%, at least about 96%, at least about 97%, at least about 98%, or at least about 99%, sequence identity with SEQ ID NO: 868. In several embodiments, the HCV_E2-GFP construct comprises the amino acid sequence of SEQ ID NO: 867 or an amino acid that shares at least about 80%, at least about 85%, at least about 90%, at least about 94%, at least about 95%, at least about 96%, at least about 97%, at least about 98%, or at least about 99%, sequence identity with SEQ ID NO: 867.

[0383] In several embodiments, there is provided a polynucleotide encoding an immunosuppressive construct comprising at least a portion of an antibody that targets a signal-regulatory protein α (SIRPa) (anti-SIRPa agonist_vLH). In several embodiments, the constructs are engineered to be membrane-bound. In several embodiments, the anti-SIRPa agonist_vLH is coupled to a CD8α signal peptide (e.g., for expression purposes, the sequence of which is provided for separately herein). In several embodiments, the anti-SIRPa agonist_vLH construct is membrane-bound based on a CD8α hinge region and/or a CD8α transmembrane domain. In several embodiments, the membrane-bound anti-SIRPa agonist_vLH immunosuppressive construct comprises a CD8α signal peptide, an anti-SIRPa light chain, a linker, anti-SIRPa heavy chain, a CD8α hinge region and, a CD8α transmembrane domain and is encoded by a polynucleotide that encodes an amino acid sequence comprising SEQ ID NO: 873. In several embodiments, the amino acid sequence shares at least about 90%, at least about 94%, at least about 95%, at least about 96%, at least about 97%, at least about 98%, or at least about 99%, sequence identity, homology and/or functional equivalence with SEQ ID NO: 873. In several embodiments, the polynucleotide comprises SEQ ID NO: 874 or shares at least about 80%, at least about 85%, at least about 90%, at least about 94%, at least about 95%, at least about 96%, at least about 97%, at least about 98%, or at least about 99%, sequence identity with SEQ ID NO: 874. Optionally, the polynucleotide encodes a detectable tag (e.g., a FLAG tag) and/or can comprise an internal ribosome entry site (IRES) that allows for expression of an additional protein, such as a detectable tag (e.g., GFP). In several embodiments, a linker (e.g., a GS linker) is positioned between the anti-SIRPa agonist_vLH and the tag. In several embodiments, the polynucleotide encoding anti-SIRPa agonist_vLH and GFP comprises SEQ ID NO: 872 or shares at least about 80%, at least about 85%, at least about 90%, at least about 94%, at least about 95%, at least about 96%, at least about 97%, at least about 98%, or at least about 99%, sequence identity with SEQ ID NO: 872. In several embodiments, the anti-SIRPa agonist_vLH-GFP construct comprises the amino acid sequence of SEQ ID NO: 871 or an amino acid that shares at least about 80%, at least about 85%, at least about 90%, at least about 94%, at least about 95%, at least about 96%, at least about 97%, at least about 98%, or at least about 99%, sequence identity with SEQ ID NO: 871.

[0384] In several embodiments, there is provided a polynucleotide encoding an immunosuppressive construct comprising at least CEA Cell Adhesion Molecule 1-derived domain (CEACAMI). In several embodiments, the constructs are engineered to be membrane-bound. In several embodiments, the CEACAMI is coupled to a CD8α signal peptide (e.g., for expression purposes, the sequence of which is provided for separately herein). In several embodiments, the CEACAMI immunosuppressive construct comprises a CD8α signal peptide and a CEACAMI-derived protein. In several embodiments, the CEACAMI immunosuppressive construct is encoded by a polynucleotide that encodes an amino acid sequence comprising SEQ ID NO: 877. In several embodiments, the amino acid sequence shares at least about 90%, at least about 94%, at least about 95%, at least about 96%, at least about 97%, at least about 98%, or at least about 99%, sequence identity, homology and/or functional equivalence with SEQ ID NO: 877. In several embodiments, the polynucleotide comprises SEQ ID NO: 878 or shares at least about 80%, at least about 85%, at least about 90%, at least about 94%, at least about 95%, at least about 96%, at least about 97%, at least about 98%, or at least about 99%, sequence identity with SEQ ID NO: 878. Optionally, the polynucleotide encodes a detectable tag (e.g., a FLAG tag) and/or can comprise an internal ribosome entry site (IRES) that allows for expression of an additional protein, such as a detectable tag (e.g., GFP). In several embodiments, a linker (e.g., a GS linker) is positioned between the CEACAMI and the tag. In several embodiments, the polynucleotide encoding the CEACAMI and GFP comprises SEQ ID NO: 876 or shares at least about 80%, at least about 85%, at least about 90%, at least about 94%, at least about 95%, at least about 96%, at least about 97%, at least about 98%, or at least about 99%, sequence identity with SEQ ID NO: 876. In several embodiments, the CEACAMI-GFP construct comprises the amino acid sequence of SEQ ID NO: 875 or an amino acid that shares at least about 80%, at least about 85%, at least about 90%, at least about 94%, at least about 95%, at least about 96%, at least about 97%, at least about 98%, or at least about 99%, sequence identity with SEQ ID NO: 875.

[0385] In several embodiments, there is provided a polynucleotide encoding an immunosuppressive construct comprising CD155 transmembrane domain (CD155tm_3M). In several embodiments, the CD155tm_3M is coupled to a CD8α signal peptide (e.g., for expression purposes, the sequence of which is provided for separately herein). In several embodiments, the CD155tm_3Mimmunosuppressive construct comprises a CD8α signal peptide and a CD155-derived protein. In several embodiments, the CD155tm_3M immunosuppressive construct is encoded by a polynucleotide that encodes an amino acid sequence comprising SEQ ID NO: 881. In several embodiments, the amino acid sequence shares at least about 90%, at least about 94%, at least about 95%, at least about 96%, at least about 97%, at least about 98%, or at least about 99%, sequence identity, homology and/or functional equivalence with SEQ ID NO: 881. In several embodiments, the polynucleotide comprises SEQ ID NO: 882 or shares at least about 80%, at least about 85%, at least about 90%, at least about 94%, at least about 95%, at least about 96%, at least about 97%, at least about 98%, or at least about 99%, sequence identity with SEQ ID NO: 882. Optionally, the polynucleotide encodes a detectable tag (e.g., a FLAG tag) and/or can comprise an internal ribosome entry site (IRES) that allows for expression of an additional protein, such as a detectable tag (e.g., GFP). In several embodiments, a linker (e.g., a GS linker) is positioned between the CD155tm_3M and the tag. In several embodiments, the polynucleotide encoding the CD155tm_3M and GFP comprises SEQ ID NO: 880 or shares at least about 80%, at least about 85%, at least about 90%, at least about 94%, at least about 95%, at least about 96%, at least about 97%, at least about 98%, or at least about 99%, sequence identity with SEQ ID NO: 880. In several embodiments, the CD155tm_3M-GFP construct comprises the amino acid sequence of SEQ ID NO: 879 or an amino acid that shares at least about 80%, at least about 85%, at least about 90%, at least about 94%, at least about 95%, at least about 96%, at least about 97%, at least about 98%, or at least about 99%, sequence identity with SEQ ID NO: 879.

[0386] In several embodiments, there is provided a polynucleotide encoding an immunosuppressive construct comprising CD31 transmembrane domain (CD31tm). In several embodiments, the CD31tm is coupled to a CD8α signal peptide (e.g., for expression purposes, the sequence of which is provided for separately herein). In several embodiments, the CD31tm immunosuppressive construct comprises a CD8α signal peptide and a CD31-derived protein. In several embodiments, the CD31tm immunosuppressive construct is encoded by a polynucleotide that encodes an amino acid sequence comprising SEQ ID NO: 885. In several embodiments, the amino acid sequence shares at least about 90%, at least about 94%, at least about 95%, at least about 96%, at least about 97%, at least about 98%, or at least about 99%, sequence identity, homology and/or functional equivalence with SEQ ID NO: 885. In several embodiments, the polynucleotide comprises SEQ ID NO: 886 or shares at least about 80%, at least about 85%, at least about 90%, at least about 94%, at least about 95%, at least about 96%, at least about 97%, at least about 98%, or at least about 99%, sequence identity with SEQ ID NO: 886. Optionally, the polynucleotide encodes a detectable tag (e.g., a FLAG tag) and/or can comprise an internal ribosome entry site (IRES) that allows for expression of an additional protein, such as a detectable tag (e.g., GFP). In several embodiments, a linker (e.g., a GS linker) is positioned between the CD31tm and the tag. In several embodiments, the polynucleotide encoding the CD31tm and GFP comprises SEQ ID NO: 884 or shares at least about 80%, at least about 85%, at least about 90%, at least about 94%, at least about 95%, at least about 96%, at least about 97%, at least about 98%, or at least about 99%, sequence identity with SEQ ID NO: 884. In several embodiments, the CD31tm-GFP construct comprises the amino acid sequence of SEQ ID NO: 883 or an amino acid that shares at least about 80%, at least about 85%, at least about 90%, at least about 94%, at least about 95%, at least about 96%, at least about 97%, at least about 98%, or at least about 99%, sequence identity with SEQ ID NO: 883.

[0387] In several embodiments, there is provided a polynucleotide encoding an immunosuppressive construct comprising CD111 transmembrane domain (CD111tm). In several embodiments, the CD111tm is coupled to a CD8α signal peptide (e.g., for expression purposes, the sequence of which is provided for separately herein). In several embodiments, the CD111tm immunosuppressive construct comprises a CD8α signal peptide and a CD111tm-derived protein. In several embodiments, the CD111 tm immunosuppressive construct is encoded by a polynucleotide that encodes an amino acid sequence comprising SEQ ID NO: 889. In several embodiments, the amino acid sequence shares at least about 90%, at least about 94%, at least about 95%, at least about 96%, at least about 97%, at least about 98%, or at least about 99%, sequence identity, homology and/or functional equivalence with SEQ ID NO: 889. In several embodiments, the polynucleotide comprises SEQ ID NO: 890 or shares at least about 80%, at least about 85%, at least about 90%, at least about 94%, at least about 95%, at least about 96%, at least about 97%, at least about 98%, or at least about 99%, sequence identity with SEQ ID NO: 890. Optionally, the polynucleotide encodes a detectable tag (e.g., a FLAG tag) and/or can comprise an internal ribosome entry site (IRES) that allows for expression of an additional protein, such as a detectable tag (e.g., GFP). In several embodiments, a linker (e.g., a GS linker) is positioned between the CD111tm and the tag. In several embodiments, the polynucleotide encoding the CD111tm and GFP comprises SEQ ID NO: 888 or shares at least about 80%, at least about 85%, at least about 90%, at least about 94%, at least about 95%, at least about 96%, at least about 97%, at least about 98%, or at least about 99%, sequence identity with SEQ ID NO: 888. In several embodiments, the CD111tm-GFP construct comprises the amino acid sequence of SEQ ID NO: 887 or an amino acid that shares at least about 80%, at least about 85%, at least about 90%, at least about 94%, at least about 95%, at least about 96%, at least about 97%, at least about 98%, or at least about 99%, sequence identity with SEQ ID NO: 887.

[0388] In several embodiments, there is provided a polynucleotide encoding an immunosuppressive construct comprising CD200 transmembrane domain (CD200tm). In several embodiments, the CD200tm is coupled to a CD8α signal peptide (e.g., for expression purposes, the sequence of which is provided for separately herein). In several embodiments, the CD200tm immunosuppressive construct comprises a CD8α signal peptide and a CD200tm-derived protein. In several embodiments, the CD200tm immunosuppressive construct is encoded by a polynucleotide that encodes an amino acid sequence comprising SEQ ID NO: 893. In several embodiments, the amino acid sequence shares at least about 90%, at least about 94%, at least about 95%, at least about 96%, at least about 97%, at least about 98%, or at least about 99%, sequence identity, homology and/or functional equivalence with SEQ ID NO: 893. In several embodiments, the polynucleotide comprises SEQ ID NO: 894 or shares at least about 80%, at least about 85%, at least about 90%, at least about 94%, at least about 95%, at least about 96%, at least about 97%, at least about 98%, or at least about 99%, sequence identity with SEQ ID NO: 894. Optionally, the polynucleotide encodes a detectable tag (e.g., a FLAG tag) and/or can comprise an internal ribosome entry site (IRES) that allows for expression of an additional protein, such as a detectable tag (e.g., GFP). In several embodiments, a linker (e.g., a GS linker) is positioned between the CD200tm and the tag. In several embodiments, the polynucleotide encoding the CD200tm and GFP comprises SEQ ID NO: 892 or shares at least about 80%, at least about 85%, at least about 90%, at least about 94%, at least about 95%, at least about 96%, at least about 97%, at least about 98%, or at least about 99%, sequence identity with SEQ ID NO: 892. In several embodiments, the CD200tm-GFP construct comprises the amino acid sequence of SEQ ID NO: 891 or an amino acid that shares at least about 80%, at least about 85%, at least about 90%, at least about 94%, at least about 95%, at least about 96%, at least about 97%, at least about 98%, or at least about 99%, sequence identity with SEQ ID NO: 891.

[0389] In several embodiments, the engineered cells provided for herein comprise a chimeric receptor that targets NKG2D, wherein the CAR comprises an amino acid of SEQ ID NO: 174, or comprises an amino acid sequence with at least about 80%, at least about 85%, at least about 90%, at least about 94%, at least about 95%, at least about 96%, at least about 97%, at least about 98%, or at least about 99%, sequence identity, homology and/or functional equivalence to SEQ ID NO: 174 and one or more copies of one or more of the following membrane-bound immunosuppressive amino acid sequences: SEQ ID NO: 218, 223, 228, 233, 238, 243, 248, 253, 256, 259, 262, 265, 268, and 271.

[0390] In several embodiments, the engineered cells provided for herein comprise a CAR that targets CD19, wherein the CAR comprises an amino acid of SEQ ID NO: 178, or comprises an amino acid sequence with at least about 80%, at least about 85%, at least about 90%, at least about 94%, at least about 95%, at least about 96%, at least about 97%, at least about 98%, or at least about 99%, sequence identity, homology and/or functional equivalence to SEQ ID NO: 178 and one or more copies of one or more of the following membrane-bound immunosuppressive amino acid sequences: SEQ ID NO: 218, 223, 228, 233, 238, 243, 248, 253, 256, 259, 262, 265, 268, and 271.

[0391] In several embodiments, the engineered cells provided for herein comprise a CAR that targets CD19, wherein the CAR comprises is encoded by SEQ ID NO: 466, or comprises an amino acid sequence with at least about 80%, at least about 85%, at least about 90%, at least about 94%, at least about 95%, at least about 96%, at least about 97%, at least about 98%, or at least about 99%, sequence identity, homology and/or functional equivalence to the sequence encoded by SEQ ID NO: 466 and one or more copies of one or more of the following membrane-bound immunosuppressive amino acid sequences: SEQ ID NO: 218, 223, 228, 233, 238, 243, 248, 253, 256, 259, 262, 265, 268, and 271.

[0392] In several embodiments, the engineered cells provided for herein comprise a CAR that targets CD70, wherein the CAR comprises an amino acid of any of SEQ ID NOs: 383-465, or comprises an amino acid sequence with at least about 80%, at least about 85%, at least about 90%, at least about 94%, at least about 95%, at least about 96%, at least about 97%, at least about 98%, or at least about 99%, sequence identity, homology and/or functional equivalence to any of SEQ ID NO: 383-465 and one or more copies of one or more of the following membrane-bound immunosuppressive amino acid sequences: SEQ ID NO: 218, 223, 228, 233, 238, 243, 248, 253, 256, 259, 262, 265, 268, and 271.

### HLA-Modification

[0393] In several embodiments, immune cells are engineered to alter their HLA expression profile, order to interact with one or more inhibitory receptors on host immune cells. In several embodiments, the alteration of the HLA expression profile of engineered cells functions to impart to the engineered immune cell the ability to reduce or avoid cytotoxicity or other immune clearance by host immune cells (or other engineered immune cells), thereby enhancing the persistence (and thus functional life-span) of the engineered immune cells.

[0394] Human leukocyte antigen-E (HLA-E) is a major ligand for the natural killer inhibitory receptor CD94/NKG2A that is expressed on NK cells. When HLA-E is bound by the CD94/NKG2A complex, an inhibitory signaling cascade is initiated, resulting in reduced NK cell activity. Thus, expression of HLA-E can dampen the cytotoxic effects of host NK cells against an engineered immune cell (e.g., expressing a CAR and/or immunosuppressive peptides). Likewise, HLA-G also plays an important role in inhibiting natural killer (NK) cell function, not only in the maintenance of fetal-maternal immune tolerance but also in the context of organ or tissue transplantation. It also plays a role in the immune escape of tumors from host immune cells. HLA-G can inhibit the function of many immune cells such as NK cells, CD4+ and CD8+ T cells, and dendritic cells by binding to cell surface-expressed receptors, including immunoglobulin-like transcript 2 (ILT2), ILT4 and killer cell immunoglobulin-like receptor 2DL4 (KIR2DL4). In several embodiments, immune cells as disclosed herein are engineered to express HLA-E and/or HLA-G in order to suppress host NK cell (or other engineered NK cells administered) against the engineered immune cells.

[0395] Non-limiting embodiments of such an approach are schematically depicted in FIGS. 261-26J. FIG. 261 shows an engineered immune cell according to embodiments disclosed herein that expresses a CAR comprising an immunosuppressive domain as well as a membrane-bound immunosuppressive construct. In some embodiments, expression of HLA-E and/or HLA-G is in connection with a CAR and not a membrane-bound immunosuppressive construct, or optionally with a CAR that does not include a immunosuppressive domain. FIG. 26J schematically depicts another non-limiting embodiment wherein HLA-E and/or HLA-G are co-expressed with one or more membrane-bound immunosuppressive constructs, optionally a CAR (with or without an integrated immunosuppressive domain) and optionally one or more additional immunosuppressive proteins (non-limiting examples of with include, but are not limited to CD47, PD-L1, and the poliovirus receptor (PVR, also known as CD155). As discussed above, each of CD47, PD-L1 and CD155 can operate to reduce activity of immune cells (e.g., host immune cells and/or other administered engineered immune cells). Any combination of these molecules, or any others disclosed herein can be used.

[0396] In several embodiments, such as when B2M expression is reduced or knocked out, endogenous HLA expression is lost, and in several embodiments, specific re-expression of HLA-E and or HLA-G can aid in reduce NK cell activity against immune cells engineered to express HLA-E and or HLA-G. In several embodiments, this re-expression is coupled with gene editing to reduce NKG2A expression on NK cells to be administered, which limits the suppressive effect of HLA-E on the therapeutic cells themselves. In several embodiments, HLA-E expression is specifically introduced only on T cells. In several embodiments, those T cells operate to suppress NK cell activity via interaction with the NKG2A receptor on NK cells. In some embodiments, the activity of the engineered allogeneic NK cells is suppressed temporarily. In several embodiments, the temporary suppression of engineered allogeneic NK cell activity reduces the risk of NK cell exhaustion, which prolongs the persistence of the engineered allogeneic NK cells.

[0397] In several embodiments, there is provided a polynucleotide encoding HLA-E. In several embodiments, the polynucleotide encodes an HLA-E amino acid sequence comprising SEQ ID NO: 273. In several embodiments, the polynucleotide encodes a sequence that shares at least about 80%, at least about 85%, at least about 90%, at least about 94%, at least about 95%, at least about 96%, at least about 97%, at least about 98%, or at least about 99%, sequence identity, homology and/or functional equivalence with SEQ ID NO: 273. In several embodiments, the polynucleotide comprises SEQ ID NO: 274 or shares at least about 90%, at least about 94%, at least about 95%, at least about 96%, at least about 97%, at least about 98%, or at least about 99%, sequence identity with SEQ ID NO: 274. In several embodiments, the encoded HLA-E is an HLA-E single chain trimer (SCT) composed of a canonical HLA-E binding peptide, mature human beta2-microglobulin, and mature HLA-E heavy chain (HLA-E trimer_SS). In several embodiments, the construct comprises a CD8α signal peptide, a first B2M sequence, an HLG peptide leader sequence, a linker (e.g., a GS linker), a second B2M sequence, a linker (e.g., a second GS linker), and an HLA-E sequence. In several embodiments, the HLA-E trimer_SS construct is encoded by a polynucleotide that encodes an amino acid sequence comprising SEQ ID NO: 276 or SEQ ID NO: 689. In several embodiments, the polynucleotide encodes a sequence that shares at least about 80%, at least about 85%, at least about 90%, at least about 94%, at least about 95%, at least about 96%, at least about 97%, at least about 98%, or at least about 99%, sequence identity, homology and/or functional equivalence with SEQ ID NO: 276 or SEQ ID NO: 689. In several embodiments, the polynucleotide comprises SEQ ID NO: 277 (or SEQ ID NO: 690) or shares at least about 80%, at least about 85%, at least about 90%, at least about 94%, at least about 95%, at least about 96%, at least about 97%, at least about 98%, or at least about 99%, sequence identity with SEQ ID NO: 277 or SEQ ID NO: 690. Optionally, the polynucleotide encodes a detectable tag (e.g., a FLAG tag) and/or can comprise an internal ribosome entry site (IRES) that allows for expression of an additional protein, such as a detectable tag (e.g., GFP). In several embodiments, the polynucleotide encoding the HLA-E trimer_SS construct and GFP comprises SEQ ID NO: 275 or shares at least about 80%, at least about 85%, at least about 90%, at least about 94%, at least about 95%, at least about 96%, at least about 97%, at least about 98%, or at least about 99%, sequence identity with SEQ ID NO: 275. In several embodiments, the polynucleotide encoding the HLA-E trimer_SS construct, a FLAG tag, and GFP comprises SEQ ID NO: 688 or shares at least about 80%, at least about 85%, at least about 90%, at least about 94%, at least about 95%, at least about 96%, at least about 97%, at least about 98%, or at least about 99%, sequence identity with SEQ ID NO: 688. In several embodiments, the HLA-E trimer_SS construct with a FLAG tag and GFP is encoded by a polynucleotide that encodes an amino acid sequence comprising SEQ ID NO: 687, or having at least about 80%, at least about 85%, at least about 90%, at least about 94%, at least about 95%, at least about 96%, at least about 97%, at least about 98%, or at least about 99%, sequence identity with SEQ ID NO: 687.

[0398] In several embodiments, similar constructs are provided for HLA-G wherein the HLA-G trimer_SS construct comprises a CD8α signal peptide, a first B2M sequence, an HLG peptide leader sequence, a linker (e.g., a GS linker), a second B2M sequence, a linker (e.g., a second GS linker), and an HLA-G sequence. In several embodiments, the HLA-G trimer_SS construct is encoded by a polynucleotide that encodes an amino acid sequence comprising SEQ ID NO: 279. In several embodiments, the polynucleotide encodes a sequence that shares at least about 80%, at least about 85%, at least about 90%, at least about 94%, at least about 95%, at least about 96%, at least about 97%, at least about 98%, or at least about 99%, sequence identity, homology and/or functional equivalence with SEQ ID NO: 279. In several embodiments, the HLA-G polypeptide comprises a functional portion of SEQ ID NO: 278.

[0399] In the context of viral infection, MHC class I-restricted CD8+ cytotoxic T lymphocytes are recruited to control viral infections. These cytotoxic T lymphocytes recognize and lyse virus-infected cells through engagement of the lymphocyte T cell receptor with MHC class I molecules that present viral antigens on the surface of infected cells. MHC class I heavy chain associates with beta-2 microglobulin (B2M) to form a heterodimer, which constitutes part of the MHC class I peptide-loading complex. Human cytomegalovirus has evolved several gene products of the unique short region protein, US2, US3, US6, and US11, which interfere with antigen presentation and cell surface expression of MHC class I molecules. While interference in antigen presentation and MHC class I down-regulation on the cell surface allows infected cells to evade virus-specific cytotoxic T lymphocytes, the down-regulation of MHC class I molecules renders the virally infected cells more susceptible to host NK cells. To counteract this, human cytomegalovirus encodes multiple genes that function to evade NK-mediated cell lysis of infected cells, one of which is UL18. UL18 binds LIR-1, an NK cell inhibitory receptor. UL18 shares a high level of amino acid sequence identity with MHC class I and therefore UL18 can act as an MHCI surrogate and associate with B2M. Thus, in several embodiments, a chimeric UL18-B2M construct (see a non-limiting schematic at FIG. 27) is expressed on engineered cells as disclosed herein, enabling UL18 interaction with the LIR-1 receptor on NK cells (either host or administered) and reduce the cytotoxic activity of those NK cells against the engineered UL18-expressing immune cell.

[0400] In several embodiments, there is provided a polynucleotide encoding UL18. In several embodiments, the UL18-encoding polynucleotide encodes an amino acid sequence comprising SEQ ID NO: 280. In several embodiments, the polynucleotide encodes a sequence that shares at least about 80%, at least about 85%, at least about 90%, at least about 94%, at least about 95%, at least about 96%, at least about 97%, at least about 98%, or at least about 99%, sequence identity, homology and/or functional equivalence with SEQ ID NO: 280. In several embodiments, the polynucleotide comprises SEQ ID NO: 281 or shares at least about 80%, at least about 85%, at least about 90%, at least about 94%, at least about 95%, at least about 96%, at least about 97%, at least about 98%, or at least about 99%, sequence identity with SEQ ID NO: 281. In several embodiments, the encoded UL18 is an chimeric UL18-B2M single chain trimer (SCT) composed of a canonical HLA-E binding peptide, mature human beta2-microglobulin, and UL18. In several embodiments, the chimeric UL18-B2M construct comprises a CD8α signal peptide, a first B2M sequence, an HLG peptide leader sequence, a linker (e.g., a GS linker), a second B2M sequence, a linker (e.g., a second GS linker), an a UL18 sequence. In several embodiments, the chimeric UL18-B2M construct is encoded by a polynucleotide that encodes an amino acid sequence comprising SEQ ID NO: 283. In several embodiments, the polynucleotide encodes a sequence that shares at least about 80%, at least about 85%, at least about 90%, at least about 94%, at least about 95%, at least about 96%, at least about 97%, at least about 98%, or at least about 99%, sequence identity, homology and/or functional equivalence with SEQ ID NO: 283 or SEQ ID NO: 686. In several embodiments, the polynucleotide comprises SEQ ID NO: 284 (or SEQ ID NO: 685) or shares at least about 80%, at least about 85%, at least about 90%, at least about 94%, at least about 95%, at least about 96%, at least about 97%, at least about 98%, or at least about 99%, sequence identity with SEQ ID NO: 284 (or SEQ ID NO: 685). Optionally, the polynucleotide encodes a detectable tag (e.g., a FLAG tag) and/or can comprise an internal ribosome entry site (IRES) that allows for expression of an additional protein, such as a detectable tag (e.g., GFP). In several embodiments, the polynucleotide encoding the chimeric UL18-B2M construct and GFP comprises SEQ ID NO: 292 or shares at least about 80%, at least about 85%, at least about 90%, at least about 94%, at least about 95%, at least about 96%, at least about 97%, at least about 98%, or at least about 99%, sequence identity with SEQ ID NO: 292. In several embodiments, the polynucleotide encoding the chimeric UL18-B2M construct, a FLAG tag and GFP comprises SEQ ID NO: 684 or shares at least about 80%, at least about 85%, at least about 90%, at least about 94%, at least about 95%, at least about 96%, at least about 97%, at least about 98%, or at least about 99%, sequence identity with SEQ ID NO: 684. In additional embodiments, the polynucleotide encoding the chimeric UL18-B2M construct with a FLAG tag and GFP encodes the amino acid sequence of SEQ ID NO: 684 or a sequence that shares at least about 80%, at least about 85%, at least about 90%, at least about 94%, at least about 95%, at least about 96%, at least about 97%, at least about 98%, or at least about 99%, sequence identity, homology and/or functional equivalence with SEQ ID NO: 684. In additional embodiments, the polynucleotide encoding the chimeric UL18-B2M construct encodes the amino acid sequence of SEQ ID NO: 285 or a sequence that shares at least about 80%, at least about 85%, at least about 90%, at least about 94%, at least about 95%, at least about 96%, at least about 97%, at least about 98%, or at least about 99%, sequence identity, homology and/or functional equivalence with SEQ ID NO: 285. In several embodiments, the polynucleotide comprises SEQ ID NO: 281 or shares at least about 80%, at least about 85%, at least about 90%, at least about 94%, at least about 95%, at least about 96%, at least about 97%, at least about 98%, or at least about 99%, sequence identity with SEQ ID NO: 285.

[0401] In several embodiments, the engineered cells provided for herein comprise a chimeric receptor that targets NKG2D, wherein the CAR comprises an amino acid of SEQ ID NO: 174, or comprises an amino acid sequence with at least about 80%, at least about 85%, at least about 90%, at least about 94%, at least about 95%, at least about 96%, at least about 97%, at least about 98%, or at least about 99%, sequence identity, homology and/or functional equivalence to SEQ ID NO: 174 and one or more copies of one or more of the following membrane-bound immunosuppressive constructs: SEQ ID NO: 273, 276, 279, 280, or 283.

[0402] In several embodiments, the engineered cells provided for herein comprise a CAR that targets CD19, wherein the CAR comprises an amino acid of SEQ ID NO: 178, or comprises an amino acid sequence with at least about 80%, at least about 85%, at least about 90%, at least about 94%, at least about 95%, at least about 96%, at least about 97%, at least about 98%, or at least about 99%, sequence identity, homology and/or functional equivalence to SEQ ID NO: 178 and one or more copies of one or more of the following membrane-bound immunosuppressive constructs: SEQ ID NO: 273, 276, 279, 280, or 283.

[0403] In several embodiments, the engineered cells provided for herein comprise a CAR that targets CD19, wherein the CAR is encoded by SEQ ID NO: 466, or comprises an amino acid sequence with at least about 80%, at least about 85%, at least about 90%, at least about 94%, at least about 95%, at least about 96%, at least about 97%, at least about 98%, or at least about 99%, sequence identity, homology and/or functional equivalence to the sequence encoded by SEQ ID NO: 466 and one or more copies of one or more of the following membrane-bound immunosuppressive constructs: SEQ ID NO: 273, 276, 279, 280, or 283.

[0404] In several embodiments, the engineered cells provided for herein comprise a CAR that targets CD70, wherein the CAR comprises an amino acid of any of SEQ ID NOs: 383-465, or comprises an amino acid sequence with at least about 80%, at least about 85%, at least about 90%, at least about 94%, at least about 95%, at least about 96%, at least about 97%, at least about 98%, or at least about 99%, sequence identity, homology and/or functional equivalence to any of SEQ ID NO: 383-465 and one or more copies of one or more of the following membrane-bound immunosuppressive constructs: SEQ ID NO: 273, 276, 279, 280, or 283.

[0405] As discussed herein, in several embodiments, knockout of B2M expression results in loss of MHC expression on the edited cell. However, in several embodiments, HLA can be re-expressed, for example HLA-E or HLA-G. In several embodiments, the re-expression of the HLA is accomplished using a disulfilde trap single chain trimer (dtSCT) is used to express HLA-E and/or HLA-G and an immunosuppressive peptide, as well as B2M (HLA-E_STE20 or HLA-E_STE15). Provided for herein, in several embodiments, is a polynucleotide encoding a chimeric immunosuppressive construct comprising an HLA-G peptide, mature B2M and mature HLA-E. In several embodiments, such a construct comprises one or more linkers. In several embodiments, the immunosuppressive construct comprises a B2M signal peptide, an HLA-G peptide (amino acids 3-11 of HLA-G), a disulfide-bridge containing linker (e.g., a GS linker comprising at least two cysteine residues), a mature B2M domain, an additional linker (e.g., a GS linker), and a mature HLA-E domain. In several embodiments, the HLA-E_STE20 is encoded by a polynucleotide that encodes an amino acid sequence comprising SEQ ID NO: 829. In several embodiments, the amino acid sequence shares at least about 90%, at least about 94%, at least about 95%, at least about 96%, at least about 97%, at least about 98%, or at least about 99%, sequence identity, homology and/or functional equivalence with SEQ ID NO: 829. In several embodiments, the polynucleotide comprises SEQ ID NO: 830 or shares at least about 80%, at least about 85%, at least about 90%, at least about 94%, at least about 95%, at least about 96%, at least about 97%, at least about 98%, or at least about 99%, sequence identity with SEQ ID NO: 830. Optionally, the polynucleotide encodes a detectable tag (e.g., a FLAG tag) and/or can comprise an internal ribosome entry site (IRES) that allows for expression of an additional protein, such as a detectable tag (e.g., GFP). In several embodiments, a linker (e.g., a GS linker) is positioned between the HLA-E_STE20 and the tag. In several embodiments, the polynucleotide encoding HLA-E_STE20 and GFP comprises SEQ ID NO: 828 or shares at least about 80%, at least about 85%, at least about 90%, at least about 94%, at least about 95%, at least about 96%, at least about 97%, at least about 98%, or at least about 99%, sequence identity with SEQ ID NO: 828. In several embodiments, the HLA-E_STE20-GFP construct comprises the amino acid sequence of SEQ ID NO: 827 or an amino acid that shares at least about 80%, at least about 85%, at least about 90%, at least about 94%, at least about 95%, at least about 96%, at least about 97%, at least about 98%, or at least about 99%, sequence identity with SEQ ID NO: 827.

### Extracellular Domains (Tumor Binder)

[0406] Some embodiments of the compositions and methods described herein relate to a chimeric antigen receptor that includes an extracellular domain that comprises a tumor-binding domain (also referred to as an antigen-binding protein or antigen-binding domain) as described herein. The tumor binding domain, depending on the embodiment, targets, for example CD19, CD123, CD70, Her2, mesothelin, Claudin 6, BCMA, EGFR, among others. Several embodiments of the compositions and methods described herein relate to a chimeric receptor that includes an extracellular domain that comprises a ligand binding domain that binds a ligand expressed by a tumor cell (also referred to as an activating chimeric receptor) as described herein. The ligand binding domain, depending on the embodiment, targets for example MICA, MICB, ULBP1, ULBP2, ULBP3, ULBP4, ULBP5, and ULBP6 (among others).

[0407] In some embodiments, the antigen-binding domain is derived from or comprises wild-type or non-wild-type sequence of an antibody, an antibody fragment, an scFv, a Fv, a Fab, a (Fab′)2, a single domain antibody (SDAB), a vH or vL domain, a camelid VHH domain, or a non-immunoglobulin scaffold such as a DARPIN, an affibody, an affilin, an adnectin, an affitin, a repebody, a fynomer, an alphabody, an avimer, an atrimer, a centyrin, a pronectin, an anticalin, a kunitz domain, an Armadillo repeat protein, an autoantigen, a receptor or a ligand. In some embodiments, the tumor-binding domain contains more than one antigen binding domain. In embodiments, the antigen-binding domain is operably linked directly or via an optional linker to the NH2-terminal end of a TCR domain (e.g. constant chains of TCR-alpha, TCR-betal, TCR-beta2, preTCR-alpha, pre-TCR-alpha-Del48, TCR-gamma, or TCR-delta).

### Antigen-Binding Proteins

[0408] There are provided, in several embodiments, antigen-binding proteins. As used herein, the term “antigen-binding protein” shall be given its ordinary meaning, and shall also refer to a protein comprising an antigen-binding fragment that binds to an antigen and, optionally, a scaffold or framework portion that allows the antigen-binding fragment to adopt a conformation that promotes binding of the antigen-binding protein to the antigen. In some embodiments, the antigen is a cancer antigen (e.g., CD19) or a fragment thereof. In some embodiments, the antigen-binding fragment comprises at least one CDR from an antibody that binds to the antigen. In some embodiments, the antigen-binding fragment comprises all three CDRs from the heavy chain of an antibody that binds to the antigen or from the light chain of an antibody that binds to the antigen. In still some embodiments, the antigen-binding fragment comprises all six CDRs from an antibody that binds to the antigen (three from the heavy chain and three from the light chain). In several embodiments, the antigen-binding fragment comprises one, two, three, four, five, or six CDRs from an antibody that binds to the antigen, and in several embodiments, the CDRs can be any combination of heavy and/or light chain CDRs. The antigen-binding fragment in some embodiments is an antibody fragment.

[0409] Nonlimiting examples of antigen-binding proteins include antibodies, antibody fragments (e.g., an antigen-binding fragment of an antibody), antibody derivatives, and antibody analogs. Further specific examples include, but are not limited to, a single-chain variable fragment (scFv), a nanobody (e.g. VH domain of camelid heavy chain antibodies; VHH fragment), a Fab fragment, a Fab′ fragment, a F(ab′)2 fragment, a Fv fragment, a Fd fragment, and a complementarity determining region (CDR) fragment. These molecules can be derived from any mammalian source, such as human, mouse, rat, rabbit, or pig, dog, or camelid. Antibody fragments may compete for binding of a target antigen with an intact (e.g., native) antibody and the fragments may be produced by the modification of intact antibodies (e.g. enzymatic or chemical cleavage) or synthesized de novo using recombinant DNA technologies or peptide synthesis. The antigen-binding protein can comprise, for example, an alternative protein scaffold or artificial scaffold with grafted CDRs or CDR derivatives. Such scaffolds include, but are not limited to, antibody-derived scaffolds comprising mutations introduced to, for example, stabilize the three-dimensional structure of the antigen-binding protein as well as wholly synthetic scaffolds comprising, for example, a biocompatible polymer. In addition, peptide antibody mimetics (“PAMs”) can be used, as well as scaffolds based on antibody mimetics utilizing fibronectin components as a scaffold.

[0410] In some embodiments, the antigen-binding protein comprises one or more antibody fragments incorporated into a single polypeptide chain or into multiple polypeptide chains. For instance, antigen-binding proteins can include, but are not limited to, a diabody; an intrabody; a domain antibody (single VL or VH domain or two or more VH domains joined by a peptide linker); a maxibody (2 scFvs fused to Fc region); a triabody; a tetrabody; a minibody (scFv fused to CH3 domain); a peptibody (one or more peptides attached to an Fc region); a linear antibody (a pair of tandem Fd segments (VH-CH1-VH-CH1) which, together with complementary light chain polypeptides, form a pair of antigen binding regions); a small modular immunopharmaceutical; and immunoglobulin fusion proteins (e.g. IgG-scFv, IgG-Fab, 2scFv-IgG, 4scFv-IgG, VH-IgG, IgG-VH, and Fab-scFv-Fc).

[0411] In some embodiments, the antigen-binding protein has the structure of an immunoglobulin. As used herein, the term “immunoglobulin” shall be given its ordinary meaning, and shall also refer to a tetrameric molecule, with each tetramer comprising two identical pairs of polypeptide chains, each pair having one “light” (about 25 kDa) and one “heavy” chain (about 50-70 kDa). The amino-terminal portion of each chain includes a variable region of about 100 to 110 or more amino acids primarily responsible for antigen recognition. The carboxy-terminal portion of each chain defines a constant region primarily responsible for effector function.

[0412] Within light and heavy chains, the variable (V) and constant regions (C) are joined by a “J” region of about 12 or more amino acids, with the heavy chain also including a “D” region of about 10 more amino acids. The variable regions of each light/heavy chain pair form the antibody binding site such that an intact immunoglobulin has two binding sites.

[0413] Immunoglobulin chains exhibit the same general structure of relatively conserved framework regions (FR) joined by three hypervariable regions, also called complementarity determining regions or CDRs. From N-terminus to C-terminus, both light and heavy chains comprise the domains FR1, CDR1, FR2, CDR2, FR3, CDR3 and FR4.

[0414] Human light chains are classified as kappa and lambda light chains. An antibody “light chain”, refers to the smaller of the two types of polypeptide chains present in antibody molecules in their naturally occurring conformations. Kappa (K) and lambda (A) light chains refer to the two major antibody light chain isotypes. A light chain may include a polypeptide comprising, from amino terminus to carboxyl terminus, a single immunoglobulin light chain variable region (VL) and a single immunoglobulin light chain constant domain (CL).

[0415] Heavy chains are classified as mu (p), delta (A), gamma (γ), alpha (a), and epsilon (c), and define the antibody's isotype as IgM, IgD, IgG, IgA, and IgE, respectively. An antibody “heavy chain” refers to the larger of the two types of polypeptide chains present in antibody molecules in their naturally occurring conformations, and which normally determines the class to which the antibody belongs. A heavy chain may include a polypeptide comprising, from amino terminus to carboxyl terminus, a single immunoglobulin heavy chain variable region (VH), an immunoglobulin heavy chain constant domain 1 (CH1), an immunoglobulin hinge region, an immunoglobulin heavy chain constant domain 2 (CH2), an immunoglobulin heavy chain constant domain 3 (CH3), and optionally an immunoglobulin heavy chain constant domain 4 (CH4).

[0416] The IgG-class is further divided into subclasses, namely, IgG1, IgG2, IgG3, and IgG4. The IgA-class is further divided into subclasses, namely IgA1 and IgA2. The IgM has subclasses including, but not limited to, IgM1 and IgM2. The heavy chains in IgG, IgA, and IgD antibodies have three domains (CH1, CH2, and CH3), whereas the heavy chains in IgM and IgE antibodies have four domains (CH1, CH2, CH3, and CH4). The immunoglobulin heavy chain constant domains can be from any immunoglobulin isotype, including subtypes. The antibody chains are linked together via inter-polypeptide disulfide bonds between the CL domain and the CH1 domain (e.g., between the light and heavy chain) and between the hinge regions of the antibody heavy chains.

[0417] In some embodiments, the antigen-binding protein is an antibody. The term “antibody”, as used herein, refers to a protein, or polypeptide sequence derived from an immunoglobulin molecule which specifically binds with an antigen. Antibodies can be monoclonal, or polyclonal, multiple or single chain, or intact immunoglobulins, and may be derived from natural sources or from recombinant sources. Antibodies can be tetramers of immunoglobulin molecules. The antibody may be “humanized”, “chimeric” or non-human. An antibody may include an intact immunoglobulin of any isotype, and includes, for instance, chimeric, humanized, human, and bispecific antibodies. An intact antibody will generally comprise at least two full-length heavy chains and two full-length light chains. Antibody sequences can be derived solely from a single species, or can be “chimeric,” that is, different portions of the antibody can be derived from two different species as described further below. Unless otherwise indicated, the term “antibody” also includes antibodies comprising two substantially full-length heavy chains and two substantially full-length light chains provided the antibodies retain the same or similar binding and/or function as the antibody comprised of two full length light and heavy chains. For example, antibodies having 1, 2, 3, 4, or 5 amino acid residue substitutions, insertions or deletions at the N-terminus and/or C-terminus of the heavy and/or light chains are included in the definition provided that the antibodies retain the same or similar binding and/or function as the antibodies comprising two full length heavy chains and two full length light chains. Examples of antibodies include monoclonal antibodies, polyclonal antibodies, chimeric antibodies, humanized antibodies, human antibodies, bispecific antibodies, and synthetic antibodies. There is provided, in some embodiments, monoclonal and polyclonal antibodies. As used herein, the term “polyclonal antibody” shall be given its ordinary meaning, and shall also refer to a population of antibodies that are typically widely varied in composition and binding specificity. As used herein, the term “monoclonal antibody” (“mAb”) shall be given its ordinary meaning, and shall also refer to one or more of a population of antibodies having identical sequences. Monoclonal antibodies bind to the antigen at a particular epitope on the antigen.

[0418] In some embodiments, the antigen-binding protein is a fragment or antigen-binding fragment of an antibody. The term “antibody fragment” refers to at least one portion of an antibody, that retains the ability to specifically interact with (e.g., by binding, steric hindrance, stabilizing/destabilizing, spatial distribution) an epitope of an antigen. Examples of antibody fragments include, but are not limited to, Fab, Fab′, F(ab′)2, Fv fragments, scFv antibody fragments, disulfide-linked Fvs (sdFv), a Fd fragment consisting of the VH and CHI domains, linear antibodies, single domain antibodies such as sdAb (either vL or vH), camelid vHH domains, multi-specific antibodies formed from antibody fragments such as a bivalent fragment comprising two Fab fragments linked by a disulfide bridge at the hinge region, and an isolated CDR or other epitope binding fragments of an antibody. An antigen binding fragment can also be incorporated into single domain antibodies, maxibodies, minibodies, nanobodies, intrabodies, diabodies, triabodies, tetrabodies, v-NAR and bis-scFv (see, e.g., Hollinger and Hudson, Nature Biotechnology 23: 1126-1136, 2005). Antigen binding fragments can also be grafted into scaffolds based on polypeptides such as a fibronectin type III (Fn3)(see U.S. Pat. No. 6,703,199, which describes fibronectin polypeptide mini bodies). An antibody fragment may include a Fab, Fab′, F(ab′)2, and/or Fv fragment that contains at least one CDR of an immunoglobulin that is sufficient to confer specific antigen binding to a cancer antigen (e.g., CD19). Antibody fragments may be produced by recombinant DNA techniques or by enzymatic or chemical cleavage of intact antibodies.

[0419] In some embodiments, Fab fragments are provided. A Fab fragment is a monovalent fragment having the VL, VH, CL and CH1 domains; a F(ab′)2 fragment is a bivalent fragment having two Fab fragments linked by a disulfide bridge at the hinge region; a Fd fragment has the VH and CH1 domains; an Fv fragment has the VL and VH domains of a single arm of an antibody; and a dAb fragment has a VH domain, a VL domain, or an antigen-binding fragment of a VH or VL domain. In some embodiments, these antibody fragments can be incorporated into single domain antibodies, single-chain antibodies, maxibodies, minibodies, intrabodies, diabodies, triabodies, tetrabodies, v-NAR and bis-scFv. In some embodiments, the antibodies comprise at least one CDR as described herein.

[0420] There is also provided for herein, in several embodiments, single-chain variable fragments. As used herein, the term “single-chain variable fragment” (“scFv”) shall be given its ordinary meaning, and shall also refer to a fusion protein in which a VL and a VH region are joined via a linker (e.g., a synthetic sequence of amino acid residues) to form a continuous protein chain wherein the linker is long enough to allow the protein chain to fold back on itself and form a monovalent antigen binding site). For the sake of clarity, unless otherwise indicated as such, a “single-chain variable fragment” is not an antibody or an antibody fragment as defined herein. Diabodies are bivalent antibodies comprising two polypeptide chains, wherein each polypeptide chain comprises VH and VL domains joined by a linker that is configured to reduce or not allow for pairing between two domains on the same chain, thus allowing each domain to pair with a complementary domain on another polypeptide chain. According to several embodiments, if the two polypeptide chains of a diabody are identical, then a diabody resulting from their pairing will have two identical antigen binding sites. Polypeptide chains having different sequences can be used to make a diabody with two different antigen binding sites. Similarly, tribodies and tetrabodies are antibodies comprising three and four polypeptide chains, respectively, and forming three and four antigen binding sites, respectively, which can be the same or different.

[0421] In several embodiments, the antigen-binding protein comprises one or more CDRs. As used herein, the term “CDR” shall be given its ordinary meaning, and shall also refer to the complementarity determining region (also termed “minimal recognition units” or “hypervariable region”) within antibody variable sequences. The CDRs permit the antigen-binding protein to specifically bind to a particular antigen of interest. There are three heavy chain variable region CDRs (CDRH1, CDRH2 and CDRH3) and three light chain variable region CDRs (CDRL1, CDRL2 and CDRL3). The CDRs in each of the two chains typically are aligned by the framework regions to form a structure that binds specifically to a specific epitope or domain on the target protein. From N-terminus to C-terminus, naturally-occurring light and heavy chain variable regions both typically conform to the following order of these elements: FR1, CDR1, FR2, CDR2, FR3, CDR3 and FR4. A numbering system has been devised for assigning numbers to amino acids that occupy positions in each of these domains. This numbering system is defined in Kabat Sequences of Proteins of Immunological Interest (1987 and 1991, NIH, Bethesda, MD), or Chothia & Lesk, 1987, J. Mol. Biol. 196:901-917; Chothia et al., 1989, Nature 342:878-883. Complementarity determining regions (CDRs) and framework regions (FR) of a given antibody may be identified using this system. Other numbering systems for the amino acids in immunoglobulin chains include IMGT® (the international ImMunoGeneTics information system; Lefranc et al, Dev. Comp. Immunol. 29:185-203; 2005) and AHo (Honegger and Pluckthun, J. Mol. Biol. 309(3):657-670; 2001). One or more CDRs may be incorporated into a molecule either covalently or noncovalently to make it an antigen-binding protein.

[0422] In some embodiments, the antigen-binding proteins provided herein comprise one or more CDR(s) as part of a larger polypeptide chain. In some embodiments, the antigen-binding proteins covalently link the one or more CDR(s) to another polypeptide chain. In some embodiments, the antigen-binding proteins incorporate the one or more CDR(s) noncovalently. In some embodiments, the antigen-binding proteins may comprise at least one of the CDRs described herein incorporated into a biocompatible framework structure. In some embodiments, the biocompatible framework structure comprises a polypeptide or portion thereof that is sufficient to form a conformationally stable structural support, or framework, or scaffold, which is able to display one or more sequences of amino acids that bind to an antigen (e.g., CDRs, a variable region, etc.) in a localized surface region. Such structures can be a naturally occurring polypeptide or polypeptide “fold” (a structural motif), or can have one or more modifications, such as additions, deletions and/or substitutions of amino acids, relative to a naturally occurring polypeptide or fold. Depending on the embodiment, the scaffolds can be derived from a polypeptide of a variety of different species (or of more than one species), such as a human, a non-human primate or other mammal, other vertebrate, invertebrate, plant, bacteria or virus.

[0423] Depending on the embodiment, the biocompatible framework structures are based on protein scaffolds or skeletons other than immunoglobulin domains. In some such embodiments, those framework structures are based on fibronectin, ankyrin, lipocalin, neocarzinostain, cytochrome b, CP1 zinc finger, PST1, coiled coil, LACI-D1, Z domain and/or tendamistat domains.

[0424] There is also provided, in some embodiments, antigen-binding proteins with more than one binding site. In several embodiments, the binding sites are identical to one another while in some embodiments the binding sites are different from one another. For example, an antibody typically has two identical binding sites, while a “bispecific” or “bifunctional” antibody has two different binding sites. The two binding sites of a bispecific antigen-binding protein or antibody will bind to two different epitopes, which can reside on the same or different protein targets. In several embodiments, this is particularly advantageous, as a bispecific chimeric antigen receptor can impart to an engineered cell the ability to target multiple tumor markers. For example, CD19 and an additional tumor marker, such as CD123, CD70, Her2, mesothelin, Claudin 6, BCMA, EGFR, MICA, MICB, ULBP1, ULBP2, ULBP3, ULBP4, ULBP5, and ULBP6, among others, or any other marker disclosed herein or appreciated in the art as a tumor specific antigen or tumor associated antigen can be bound by a bispecific antibody.

[0425] As used herein, the term “chimeric antibody” shall be given its ordinary meaning, and shall also refer to an antibody that contains one or more regions from one antibody and one or more regions from one or more other antibodies. In some embodiments, one or more of the CDRs are derived from an anti-cancer antigen (e.g., CD19, CD123, CD70, Her2, mesothelin, PD-L1, Claudin 6, BCMA, EGFR, etc.) antibody. In several embodiments, all of the CDRs are derived from an anti-cancer antigen antibody (such as an anti-CD19 antibody). In some embodiments, the CDRs from more than one anti-cancer antigen antibodies are mixed and matched in a chimeric antibody. For instance, a chimeric antibody may comprise a CDR1 from the light chain of a first anti-cancer antigen antibody, a CDR2 and a CDR3 from the light chain of a second anti-cancer antigen antibody, and the CDRs from the heavy chain from a third anti-cancer antigen antibody. Further, the framework regions of antigen-binding proteins disclosed herein may be derived from one of the same anti-cancer antigen (e.g., CD19, CD123, CD70, Her2, mesothelin, Claudin 6, BCMA, EGFR, etc.) antibodies, from one or more different antibodies, such as a human antibody, or from a humanized antibody. In one example of a chimeric antibody, a portion of the heavy and/or light chain is identical with, homologous to, or derived from an antibody from a particular species or belonging to a particular antibody class or subclass, while the remainder of the chain(s) is/are identical with, homologous to, or derived from an antibody or antibodies from another species or belonging to another antibody class or subclass. Also provided herein are fragments of such antibodies that exhibit the desired biological activity.

[0426] In several embodiments, an antigen binding protein is directed against CD38 (also known as ADP-ribosyl cyclase 1, cADPr hydrolase 1, Cyclic ADP-ribose hydrolase 1, or T10). According to one embodiment, the CD38 antigen binding protein is an antigen binding domain of a CAR which comprises a transmembrane domain, a signaling domain, and optionally a co-stimulatory domain as disclosed herein. In several embodiments, the antigen binding protein binds to an epitope of the human CD38, and in particular to an epitope of the extracellular domain of the human CD38. In several embodiments, the CD38 binding protein comprises an scFv comprising a vL and vH domain. In several embodiments, the anti-CD38 vL domain comprises the sequence of SEQ ID NO: 523, or an amino acid sequence with at least about 80%, at least about 85%, at least about 90%, at least about 94%, at least about 95%, at least about 96%, at least about 97%, at least about 98%, or at least about 99%, sequence identity, homology and/or functional equivalence to SEQ ID NO: 523. In several embodiments, the anti-CD38 vH domain comprises the sequence of SEQ ID NO: 524, or an amino acid sequence with at least about 80%, at least about 85%, at least about 90%, at least about 94%, at least about 95%, at least about 96%, at least about 97%, at least about 98%, or at least about 99%, sequence identity, homology and/or functional equivalence to SEQ ID NO: 524. In several embodiments, the anti-CD38 binding protein is an scFv that comprises the sequence of SEQ ID NO: 532, or an amino acid sequence with at least about 80%, at least about 85%, at least about 90%, at least about 94%, at least about 95%, at least about 96%, at least about 97%, at least about 98%, or at least about 99%, sequence identity, homology and/or functional equivalence to SEQ ID NO: 532. In several embodiments, the anti-CD38 CAR comprises the sequence of SEQ ID NO: 525, or an amino acid sequence with at least about 80%, at least about 85%, at least about 90%, at least about 94%, at least about 95%, at least about 96%, at least about 97%, at least about 98%, or at least about 99%, sequence identity, homology and/or functional equivalence to SEQ ID NO: 525. In several embodiments, the anti-CD38 binding protein comprises at least one CDR from SEQ ID NO: 526-531 or a CDR having at least about 95%, at least about 96%, at least about 97%, at least about 98%, or at least about 99%, sequence identity, homology and/or functional equivalence to any of SEQ ID NO: 526-531. In several embodiments, the antigen binding protein is affinity matured to enhance binding to CD38. In several embodiments, the nucleotide sequence encoding the antigen binding protein is codon-optimized to enhance expression and/or stability of the protein.

[0427] In several embodiments, an antigen binding protein is directed against GPRCSD. According to one embodiment, the GPRCSD antigen binding protein is an antigen binding domain of a CAR which comprises a transmembrane domain, a signaling domain, and optionally a co-stimulatory domain as disclosed herein. In several embodiments, the antigen binding protein binds to an epitope of the human GPRCSD. In several embodiments, the anti-GPRCSD is an scFv comprising the amino acid sequence of any one of SEQ ID NOs: 621-630, or an amino acid sequence with at least about 80%, at least about 85%, at least about 90%, at least about 94%, at least about 95%, at least about 96%, at least about 97%, at least about 98%, or at least about 99%, sequence identity, homology and/or functional equivalence to any of SEQ ID NOs: 620-628. In several embodiments, the antigen binding protein is affinity matured to enhance binding to GPRCSD. In several embodiments, the nucleotide sequence encoding the antigen binding protein is codon-optimized to enhance expression and/or stability of the protein.

[0428] In several embodiments, an antigen binding protein is directed against CD138. In several embodiments, the anti-CD138 binding protein comprises a vL and/or vH chain. In several embodiments, the vL chain comprises the amino acid sequence of SEQ ID NO: 533, or an amino acid sequence with at least about 80%, at least about 85%, at least about 90%, at least about 94%, at least about 95%, at least about 96%, at least about 97%, at least about 98%, or at least about 99%, sequence identity, homology and/or functional equivalence to SEQ ID NO: 533. In several embodiments, the vH chain comprises the amino acid sequence of SEQ ID NO: 534, or an amino acid sequence with at least about 80%, at least about 85%, at least about 90%, at least about 94%, at least about 95%, at least about 96%, at least about 97%, at least about 98%, or at least about 99%, sequence identity, homology and/or functional equivalence to SEQ ID NO: 534. In several embodiments, the anti-CD138 binding protein comprises at least one CDR from SEQ ID NO: 536-541 or a CDR having at least about 95%, at least about 96%, at least about 97%, at least about 98%, or at least about 99%, sequence identity, homology and/or functional equivalence to any of SEQ ID NO: 536-541. In several embodiments, the anti-CD138 binding protein is an scFv comprising the amino acid sequence of SEQ ID NO: 542, or an amino acid sequence with at least about 80%, at least about 85%, at least about 90%, at least about 94%, at least about 95%, at least about 96%, at least about 97%, at least about 98%, or at least about 99%, sequence identity, homology and/or functional equivalence to SEQ ID NO: 542. In several embodiments, the anti-CD138 binding protein is integrated into a CAR which comprises a transmembrane domain, a signaling domain, and optionally a co-stimulatory domain as disclosed herein comprising the amino acid sequence of SEQ ID NO: 535 or 543, or an amino acid sequence with at least about 80%, at least about 85%, at least about 90%, at least about 94%, at least about 95%, at least about 96%, at least about 97%, at least about 98%, or at least about 99%, sequence identity, homology and/or functional equivalence to SEQ ID NO: 535 or 543. In several embodiments, the antigen binding protein is affinity matured to enhance binding to CD138. In several embodiments, the nucleotide sequence encoding the antigen binding protein is codon-optimized to enhance expression and/or stability of the protein.

[0429] In several embodiments, an antigen binding protein is directed against DLL3. In several embodiments, the anti-DLL3 binding protein is an antigen binding domain of a CAR which comprises a transmembrane domain, a signaling domain, and optionally a co-stimulatory domain as disclosed herein. In several embodiments, the anti-DLL3 antigen binding protein comprises a vH chain comprising the amino acid sequence of any of SEQ ID NOs: 570-581, or a sequence having at least about 95%, at least about 96%, at least about 97%, at least about 98%, or at least about 99%, sequence identity, homology and/or functional equivalence to any of SEQ ID NO: 570-581. In several embodiments, the anti-DLL3 antigen binding protein comprises a vL chain comprising the amino acid sequence of any of SEQ ID NOs: 582-593, or a sequence having at least about 95%, at least about 96%, at least about 97%, at least about 98%, or at least about 99%, sequence identity, homology and/or functional equivalence to any of SEQ ID NO: 582-593. In several embodiments, the anti-DLL3 binding protein comprises a polypeptide that targets DLL3 and comprises the amino acid sequence of any of SEQ ID NO: 594-595, or a sequence having at least about 95%, at least about 96%, at least about 97%, at least about 98%, or at least about 99%, sequence identity, homology and/or functional equivalence to any of SEQ ID NO: 594-595. In several embodiments, the anti-DLL3 binding protein comprises an scFv comprising the sequence of any of SEQ ID NO: 596-599, or a sequence having at least about 95%, at least about 96%, at least about 97%, at least about 98%, or at least about 99%, sequence identity, homology and/or functional equivalence to any of SEQ ID NO: 596-599. In several embodiments, the antigen binding protein is affinity matured to enhance binding to DLL3. In several embodiments, the nucleotide sequence encoding the antigen binding protein is codon-optimized to enhance expression and/or stability of the protein.

[0430] In several embodiments, an antigen binding protein is directed against the epidermal growth factor receptor EGFR. In several embodiments, the anti-EGFR binding protein is an antigen binding domain of a CAR which comprises a transmembrane domain, a signaling domain, and optionally a co-stimulatory domain as disclosed herein. In several embodiments, the anti-EGFR binding protein comprises a vH chain comprising the amino acid sequence of any of SEQ ID NO: 600, 606-607, or a sequence having at least about 95%, at least about 96%, at least about 97%, at least about 98%, or at least about 99%, sequence identity, homology and/or functional equivalence to any of SEQ ID NO: 600, 606-607. In several embodiments, the anti-EGFR binding protein comprises a vL chain comprising the amino acid sequence of any of SEQ ID NO: 601, 608-609, or a sequence having at least about 95%, at least about 96%, at least about 97%, at least about 98%, or at least about 99%, sequence identity, homology and/or functional equivalence to any of SEQ ID NO: 601, 608-609. In several embodiments, the anti-EGFR binding protein is an scFv comprising the amino acid sequence of any of SEQ ID NOs: 610-620, or a sequence having at least about 95%, at least about 96%, at least about 97%, at least about 98%, or at least about 99%, sequence identity, homology and/or functional equivalence to any of SEQ ID NO: 610-620. In several embodiments, the anti-EGFR binding protein is incorporated into a CAR having the sequence of any of SEQ ID NOs: 602-605, or a sequence having at least about 95%, at least about 96%, at least about 97%, at least about 98%, or at least about 99%, sequence identity, homology and/or functional equivalence to any of SEQ ID NO: 602-605. In several embodiments, the antigen binding protein is affinity matured to enhance binding to the EGFR. In several embodiments, the nucleotide sequence encoding the antigen binding protein is codon-optimized to enhance expression and/or stability of the protein.

[0431] In several embodiments, an antigen binding protein is directed against PSMA. In several embodiments, the anti-PSMA binding protein is an antigen binding domain of a CAR which comprises a transmembrane domain, a signaling domain, and optionally a co-stimulatory domain as disclosed herein. In several embodiments, the anti-PSMA binding protein comprises a vL chain comprising the amino acid sequence of SEQ ID NO: 634, or a sequence having at least about 95%, at least about 96%, at least about 97%, at least about 98%, or at least about 99%, sequence identity, homology and/or functional equivalence to SEQ ID NO: 634. In several embodiments, the anti-PSMA binding protein comprises a vH chain comprising the amino acid sequence of SEQ ID NO: 635, or a sequence having at least about 95%, at least about 96%, at least about 97%, at least about 98%, or at least about 99%, sequence identity, homology and/or functional equivalence to SEQ ID NO: 635. In several embodiments, the anti-PSMA binding protein comprises an scFv comprising the amino acid sequence of SEQ ID NO: 632 or 633, or a sequence having at least about 95%, at least about 96%, at least about 97%, at least about 98%, or at least about 99%, sequence identity, homology and/or functional equivalence to SEQ ID NO: 632 or 633. In several embodiments, the anti-PSMA binding protein comprises an antibody comprising the amino acid sequence of SEQ ID NO: 631, or a sequence having at least about 95%, at least about 96%, at least about 97%, at least about 98%, or at least about 99%, sequence identity, homology and/or functional equivalence to SEQ ID NO: 631. In several embodiments, the antigen binding protein is affinity matured to enhance binding to PSMA. In several embodiments, the nucleotide sequence encoding the antigen binding protein is codon-optimized to enhance expression and/or stability of the protein.

[0432] In several embodiments, an antigen binding protein is directed against FLT3. In several embodiments, the anti-FLT3 binding protein is an antigen binding domain of a CAR which comprises a transmembrane domain, a signaling domain, and optionally a co-stimulatory domain as disclosed herein. In several embodiments, the anti-FLT3 binding protein comprises one or more CDRs from the vL and/or vH chain selected from SEQ ID NOs: 636-644, or a o CDR having at least about 95%, at least about 96%, at least about 97%, at least about 98%, or at least about 99%, sequence identity, homology and/or functional equivalence to any of SEQ ID NO: 636-644. In several embodiments, the anti-FLT3 binding protein comprises a vL chain comprising the amino acid sequence of SEQ ID NO: 645, or a sequence having at least about 95%, at least about 96%, at least about 97%, at least about 98%, or at least about 99%, sequence identity, homology and/or functional equivalence to SEQ ID NO: 645. In several embodiments, the anti-FLT3 binding protein comprises a vH chain comprising the amino acid sequence of SEQ ID NO: 646, or a sequence having at least about 95%, at least about 96%, at least about 97%, at least about 98%, or at least about 99%, sequence identity, homology and/or functional equivalence to SEQ ID NO: 646. In several embodiments, the antigen binding protein is affinity matured to enhance binding to FLT3. In several embodiments, the nucleotide sequence encoding the antigen binding protein is codon-optimized to enhance expression and/or stability of the protein.

[0433] In several embodiments, an antigen binding protein is directed against KREMEN2. In several embodiments, the anti-KREMEN2 binding protein is an antigen binding domain of a CAR which comprises a transmembrane domain, a signaling domain, and optionally a co-stimulatory domain as disclosed herein. In several embodiments, the anti-KREMEN2 binding protein comprises a vL chain comprising the amino acid sequence of any of SEQ ID NOs: 647-651, or a sequence having at least about 95%, at least about 96%, at least about 97%, at least about 98%, or at least about 99%, sequence identity, homology and/or functional equivalence to any of SEQ ID NOs: 647-651. In several embodiments, the anti-KREMEN2 binding protein comprises a vH chain comprising the amino acid sequence of any of SEQ ID NOs: 652-656, or a sequence having at least about 95%, at least about 96%, at least about 97%, at least about 98%, or at least about 99%, sequence identity, homology and/or functional equivalence to any of SEQ ID NOs: 652-656. In several embodiments, the antigen binding protein is affinity matured to enhance binding to KREMEN2. In several embodiments, the nucleotide sequence encoding the antigen binding protein is codon-optimized to enhance expression and/or stability of the protein.

[0434] In several embodiments, an antigen binding protein is directed against ALPPL2. In several embodiments, the anti-ALPPL2 binding protein is an antigen binding domain of a CAR which comprises a transmembrane domain, a signaling domain, and optionally a co-stimulatory domain as disclosed herein. In several embodiments, the anti-ALPPL2 binding protein comprises a vL chain comprising the amino acid sequence of any of SEQ ID NOs: 657-659, or a sequence having at least about 95%, at least about 96%, at least about 97%, at least about 98%, or at least about 99%, sequence identity, homology and/or functional equivalence to any of SEQ ID NOs: 657-659. In several embodiments, the anti-ALPPL2 binding protein comprises a vH chain comprising the amino acid sequence of any of SEQ ID NOs: 660-662, or a sequence having at least about 95%, at least about 96%, at least about 97%, at least about 98%, or at least about 99%, sequence identity, homology and/or functional equivalence to any of SEQ ID NOs: 660-662. In several embodiments, the anti-ALPPL2 binding protein is an antibody, or scFv, containing one or more combinations of the vL and vH domains comprising the amino acid sequence of any of SEQ ID NOs: 657-662, or a sequence having at least about 95%, at least about 96%, at least about 97%, at least about 98%, or at least about 99%, sequence identity, homology and/or functional equivalence to any of SEQ ID NO: 657-662. In several embodiments, the antigen binding protein is affinity matured to enhance binding to ALPPL2. In several embodiments, the nucleotide sequence encoding the antigen binding protein is codon-optimized to enhance expression and/or stability of the protein.

[0435] In several embodiments, an antigen binding protein is directed against CLDN4. In several embodiments, the anti-CLDN4 binding protein is an antigen binding domain of a CAR which comprises a transmembrane domain, a signaling domain, and optionally a co-stimulatory domain as disclosed herein. In several embodiments, the anti-CLDN4 binding protein comprises a vL chain comprising the amino acid sequence of any of SEQ ID NOs: 663, 664, or 667, or a sequence having at least about 95%, at least about 96%, at least about 97%, at least about 98%, or at least about 99%, sequence identity, homology and/or functional equivalence to any of SEQ ID NOs: 663, 664, or 667. In several embodiments, the anti-CLDN4 binding protein comprises a vH chain comprising the amino acid sequence of any of SEQ ID NOs: 665, 666, or 668, or a sequence having at least about 95%, at least about 96%, at least about 97%, at least about 98%, or at least about 99%, sequence identity, homology and/or functional equivalence to any of SEQ ID NOs: 665, 666, or 668. In several embodiments, the anti-CLDN4 binding protein is an antibody, or scFv, containing one or more combinations of the vL and vH domains comprising the amino acid sequence of any of SEQ ID NOs: 663-668, or a sequence having at least about 95%, at least about 96%, at least about 97%, at least about 98%, or at least about 99%, sequence identity, homology and/or functional equivalence to any of SEQ ID NOs: 663-668. In several embodiments, the antigen binding protein is affinity matured to enhance binding to CLDN4. In several embodiments, the nucleotide sequence encoding the antigen binding protein is codon-optimized to enhance expression and/or stability of the protein. In several embodiments, the antigen binding protein binds to CLDN4, but not to other claudins.

[0436] In several embodiments, an antigen binding protein is directed against CLDN6. In several embodiments, the anti-CLDN6 binding protein is an antigen binding domain of a CAR which comprises a transmembrane domain, a signaling domain, and optionally a co-stimulatory domain as disclosed herein. In several embodiments, the anti-CLDN6 binding protein comprises a vL chain comprising the amino acid sequence of any of SEQ ID NOs: 669-678, or a sequence having at least about 95%, at least about 96%, at least about 97%, at least about 98%, or at least about 99%, sequence identity, homology and/or functional equivalence to any of SEQ ID NOs: 669-678. In several embodiments, the anti-CLDN6 binding protein comprises a vH chain comprising the amino acid sequence of any of SEQ ID NOs: 679-682, or a sequence having at least about 95%, at least about 96%, at least about 97%, at least about 98%, or at least about 99%, sequence identity, homology and/or functional equivalence to any of SEQ ID NOs: 679-682. In several embodiments, the anti-CLDN6 binding protein is an antibody, or scFv, containing one or more combinations of the vL and vH domains comprising the amino acid sequence of any of SEQ ID NOs: 669-682, or a sequence having at least about 95%, at least about 96%, at least about 97%, at least about 98%, or at least about 99%, sequence identity, homology and/or functional equivalence to any of SEQ ID NOs: 669-682. In several embodiments, the antigen binding protein is affinity matured to enhance binding to CLDN6. In several embodiments, the nucleotide sequence encoding the antigen binding protein is codon-optimized to enhance expression and/or stability of the protein. In several embodiments, the antigen binding protein binds to CLDN6, but not to other claudins.

[0437] In some embodiments, an antigen-binding protein is provided comprising a heavy chain variable domain having at least 90% identity to the VH domain amino acid sequence set forth in SEQ ID NO: 33. In some embodiments, the antigen-binding protein comprises a heavy chain variable domain having at least 95% identity to the VH domain amino acid sequence set forth in SEQ ID NO: 33. In some embodiments, the antigen-binding protein comprises a heavy chain variable domain having at least 96, 97, 98, or 99% identity to the VH domain amino acid sequence set forth in SEQ ID NO: 33. In several embodiments, the heavy chain variable domain may have one or more additional mutations (e.g., for purposes of humanization) in the VH domain amino acid sequence set forth in SEQ ID NO: 33, but retains specific binding to a cancer antigen (e.g., CD19). In several embodiments, the heavy chain variable domain may have one or more additional mutations in the VH domain amino acid sequence set forth in SEQ ID NO: 33, but has improved specific binding to a cancer antigen (e.g., CD19).

[0438] In some embodiments, the antigen-binding protein comprises a light chain variable domain having at least 90% identity to the VL domain amino acid sequence set forth in SEQ ID NO: 32. In some embodiments, the antigen-binding protein comprises a light chain variable domain having at least 95% identity to the VL domain amino acid sequence set forth in SEQ ID NO: 32. In some embodiments, the antigen-binding protein comprises a light chain variable domain having at least 96, 97, 98, or 99% identity to the VL domain amino acid sequence set forth in SEQ ID NO: 32. In several embodiments, the light chain variable domain may have one or more additional mutations (e.g., for purposes of humanization) in the VL domain amino acid sequence set forth in SEQ ID NO: 32, but retains specific binding to a cancer antigen (e.g., CD19). In several embodiments, the light chain variable domain may have one or more additional mutations in the VL domain amino acid sequence set forth in SEQ ID NO: 32, but has improved specific binding to a cancer antigen (e.g., CD19).

[0439] In some embodiments, the antigen-binding protein comprises a heavy chain variable domain having at least 90% identity to the VH domain amino acid sequence set forth in SEQ ID NO: 33, and a light chain variable domain having at least 90% identity to the VL domain amino acid sequence set forth in SEQ ID NO: 32. In some embodiments, the antigen-binding protein comprises a heavy chain variable domain having at least 95% identity to the VH domain amino acid sequence set forth in SEQ ID NO: 33, and a light chain variable domain having at least 95% identity to the VL domain amino acid sequence set forth in SEQ ID NO: 32. In some embodiments, the antigen-binding protein comprises a heavy chain variable domain having at least 96, 97, 98, or 99% identity to the VH domain amino acid sequence set forth in SEQ ID NO: 33, and a light chain variable domain having at least 96, 97, 98, or 99% identity to the VL domain amino acid sequence set forth in SEQ ID NO: 32.

[0440] In some embodiments, the antigen-binding protein comprises a heavy chain variable domain having the VH domain amino acid sequence set forth in SEQ ID NO: 33, and a light chain variable domain having the VL domain amino acid sequence set forth in SEQ ID NO: 32. In some embodiments, the light-chain variable domain comprises a sequence of amino acids that is at least 70%, 75%, 80%, 85%, 90%, 91%, 92%, 93%, 94%, 95%, 96%, 97%, 98%, 99%, or more, identical to the sequence of a light chain variable domain of SEQ ID NO: 32. In some embodiments, the light-chain variable domain comprises a sequence of amino acids that is at least 70%, 75%, 80%, 85%, 90%, 91%, 92%, 93%, 94%, 95%, 96%, 97%, 98%, 99%, or more, identical to the sequence of a heavy chain variable domain in accordance with SEQ ID NO: 33.

[0441] In some embodiments, the light chain variable domain comprises a sequence of amino acids that is encoded by a nucleotide sequence that is at least 70%, 75%, 80%, 85%, 90%, 91%, 92%, 93%, 94%, 95%, 96%, 97%, 98%, 99%, or more, identical to the polynucleotide sequence SEQ ID NO: 32.

[0442] In some embodiments, the light chain variable domain comprises a sequence of amino acids that is encoded by a polynucleotide that hybridizes under moderately stringent conditions to the complement of a polynucleotide that encodes a light chain variable domain in accordance with the sequence in SEQ ID NO: 32. In some embodiments, the light chain variable domain comprises a sequence of amino acids that is encoded by a polynucleotide that hybridizes under stringent conditions to the complement of a polynucleotide that encodes a light chain variable domain in accordance with the sequence in SEQ ID NO: 32.

[0443] In some embodiments, the heavy chain variable domain comprises a sequence of amino acids that is at least 70%, 75%, 80%, 85%, 90%, 91%, 92%, 93%, 94%, 95%, 96%, 97%, 98%, 99%, or more, identical to the sequence of a heavy chain variable domain in accordance with the sequence of SEQ ID NO: 33. In some embodiments, the heavy chain variable domain comprises a sequence of amino acids that is encoded by a polynucleotide that hybridizes under moderately stringent conditions to the complement of a polynucleotide that encodes a heavy chain variable domain in accordance with the sequence of SEQ ID NO: 33. In some embodiments, the heavy chain variable domain comprises a sequence of amino acids that is encoded by a polynucleotide that hybridizes under stringent conditions to the complement of a polynucleotide that encodes a heavy chain variable domain in accordance with the sequence of SEQ ID NO: 33.

[0444] In several embodiments, additional anti-CD19 binding constructs are provided. For example, in several embodiments, there is provided an scFv that targets CD19 wherein the scFv comprises a heavy chain variable region comprising the sequence of SEQ ID NO. 35. In some embodiments, the antigen-binding protein comprises a heavy chain variable domain having at least 95% identity to the HCV domain amino acid sequence set forth in SEQ ID NO: 35. In some embodiments, the antigen-binding protein comprises a heavy chain variable domain having at least 96, 97, 98, or 99% identity to the HCV domain amino acid sequence set forth in SEQ ID NO: 35. In several embodiments, the heavy chain variable domain may have one or more additional mutations (e.g., for purposes of humanization) in the HCV domain amino acid sequence set forth in SEQ ID NO: 35, but retains specific binding to a cancer antigen (e.g., CD19). In several embodiments, the heavy chain variable domain may have one or more additional mutations in the HCV domain amino acid sequence set forth in SEQ ID NO: 35, but has improved specific binding to a cancer antigen (e.g., CD19).

[0445] Additionally, in several embodiments, an scFv that targets CD19 comprises a light chain variable region comprising the sequence of SEQ ID NO. 36. In some embodiments, the antigen-binding protein comprises a light chain variable domain having at least 95% identity to the LCV domain amino acid sequence set forth in SEQ ID NO: 36. In some embodiments, the antigen-binding protein comprises a light chain variable domain having at least 96, 97, 98, or 99% identity to the LCV domain amino acid sequence set forth in SEQ ID NO: 36. In several embodiments, the light chain variable domain may have one or more additional mutations (e.g., for purposes of humanization) in the LCV domain amino acid sequence set forth in SEQ ID NO: 36, but retains specific binding to a cancer antigen (e.g., CD19). In several embodiments, the light chain variable domain may have one or more additional mutations in the LCV domain amino acid sequence set forth in SEQ ID NO: 36, but has improved specific binding to a cancer antigen (e.g., CD19).

[0446] In several embodiments, there is also provided an anti-CD19 binding moiety that comprises a light chain CDR comprising a first, second and third complementarity determining region (LC CDR1, LC CDR2, and LC CDR3, respectively. In several embodiments, the anti-CD19 binding moiety further comprises a heavy chain CDR comprising a first, second and third complementarity determining region (HC CDR1, HC CDR2, and HC CDR3, respectively. In several embodiments, the LC CDR1 comprises the sequence of SEQ ID NO. 37. In several embodiments, the LC CDR1 comprises an amino acid sequence with at least about 85%, about 90%, about 95%, or about 98% sequence identity to the sequence of SEQ NO. 37. In several embodiments, the LC CDR2 comprises the sequence of SEQ ID NO. 38. In several embodiments, the LC CDR2 comprises an amino acid sequence with at least about 85%, about 90%, about 95%, or about 98% sequence identity to the sequence of SEQ NO. 38. In several embodiments, the LC CDR3 comprises the sequence of SEQ ID NO. 39. In several embodiments, the LC CDR3 comprises an amino acid sequence with at least about 85%, about 90%, about 95%, or about 98% sequence identity to the sequence of SEQ NO. 39. In several embodiments, the HC CDR1 comprises the sequence of SEQ ID NO. 40. In several embodiments, the HC CDR1 comprises an amino acid sequence with at least about 85%, about 90%, about 95%, or about 98% sequence identity to the sequence of SEQ NO. 40. In several embodiments, the HC CDR2 comprises the sequence of SEQ ID NO. 41, 42, or 43. In several embodiments, the HC CDR2 comprises an amino acid sequence with at least about 85%, about 90%, about 95%, or about 98% sequence identity to the sequence of SEQ NO. 41, 42, or 43. In several embodiments, the HC CDR3 comprises the sequence of SEQ ID NO. 44. In several embodiments, the HC CDR3 comprises an amino acid sequence with at least about 85%, about 90%, about 95%, or about 98% sequence identity to the sequence of SEQ NO. 44.

[0447] In several embodiments, there is also provided an anti-CD19 binding moiety that comprises a light chain variable region (VL) and a heavy chain variable region (HL), the VL region comprising a first, second and third complementarity determining region (VL CDR1, VL CDR2, and VL CDR3, respectively and the VH region comprising a first, second and third complementarity determining region (VH CDR1, VH CDR2, and VH CDR3, respectively. In several embodiments, the VL region comprises the sequence of SEQ ID NO. 45, 46, 47, or 48. In several embodiments, the VL region comprises an amino acid sequence with at least about 85%, about 90%, about 95%, or about 98% sequence identity to the sequence of SEQ NO. 45, 46, 47, or 48. In several embodiments, the VH region comprises the sequence of SEQ ID NO. 49, 50, 51 or 52. In several embodiments, the VH region comprises an amino acid sequence with at least about 85%, about 90%, about 95%, or about 98% sequence identity to the sequence of SEQ NO. 49, 50, 51 or 52.

[0448] In several embodiments, there is also provided an anti-CD19 binding moiety that comprises a light chain CDR comprising a first, second and third complementarity determining region (LC CDR1, LC CDR2, and LC CDR3, respectively. In several embodiments, the anti-CD19 binding moiety further comprises a heavy chain CDR comprising a first, second and third complementarity determining region (HC CDR1, HC CDR2, and HC CDR3, respectively. In several embodiments, the LC CDR1 comprises the sequence of SEQ ID NO. 53. In several embodiments, the LC CDR1 comprises an amino acid sequence with at least about 85%, about 90%, about 95%, or about 98% sequence identity to the sequence of SEQ NO. 53. In several embodiments, the LC CDR2 comprises the sequence of SEQ ID NO. 54. In several embodiments, the LC CDR2 comprises an amino acid sequence with at least about 85%, about 90%, about 95%, or about 98% sequence identity to the sequence of SEQ NO. 54. In several embodiments, the LC CDR3 comprises the sequence of SEQ ID NO. 55. In several embodiments, the LC CDR3 comprises an amino acid sequence with at least about 85%, about 90%, about 95%, or about 98% sequence identity to the sequence of SEQ NO. 55. In several embodiments, the HC CDR1 comprises the sequence of SEQ ID NO. 56. In several embodiments, the HC CDR1 comprises an amino acid sequence with at least about 85%, about 90%, about 95%, or about 98% sequence identity to the sequence of SEQ NO. 56. In several embodiments, the HC CDR2 comprises the sequence of SEQ ID NO. 57. In several embodiments, the HC CDR2 comprises an amino acid sequence with at least about 85%, about 90%, about 95%, or about 98% sequence identity to the sequence of SEQ NO. 57. In several embodiments, the HC CDR3 comprises the sequence of SEQ ID NO. 58. In several embodiments, the HC CDR3 comprises an amino acid sequence with at least about 85%, about 90%, about 95%, or about 98% sequence identity to the sequence of SEQ NO. 58.

[0449] In some embodiments, the antigen-binding protein comprises a heavy chain variable region comprising the amino acid sequence of SEQ ID NO: 104. In some embodiments, the antigen-binding protein comprises a heavy chain variable region having at least 90% identity to the VH domain amino acid sequence set forth in SEQ ID NO: 104. In some embodiments, the antigen-binding protein comprises a heavy chain variable domain having at least 95% sequence identity to the VH domain amino acid sequence set forth in SEQ ID NO: 104. In some embodiments, the antigen-binding protein comprises a heavy chain variable domain having at least 96, 97, 98, or 99% sequence identity to the VH domain amino acid sequence set forth in SEQ ID NO: 104. In several embodiments, the heavy chain variable domain may have one or more additional mutations (e.g., for purposes of humanization) in the VH domain amino acid sequence set forth in SEQ ID NO: 104, but retains specific binding to a cancer antigen (e.g., CD19). In several embodiments, the heavy chain variable domain may have one or more additional mutations in the VH domain amino acid sequence set forth in SEQ ID NO: 104, but has improved specific binding to a cancer antigen (e.g., CD19).

[0450] In some embodiments, the antigen-binding protein comprises a light chain variable region comprising the amino acid sequence of SEQ ID NO: 105. In some embodiments, the antigen-binding protein comprises a light chain variable region having at least 90% sequence identity to the VL domain amino acid sequence set forth in SEQ ID NO: 105. In some embodiments, the antigen-binding protein comprises a light chain variable domain having at least 95% sequence identity to the VL domain amino acid sequence set forth in SEQ ID NO: 105. In some embodiments, the antigen-binding protein comprises a light chain variable domain having at least 96, 97, 98, or 99% sequence identity to the VL domain amino acid sequence set forth in SEQ ID NO: 105. In several embodiments, the light chain variable domain may have one or more additional mutations (e.g., for purposes of humanization) in the VL domain amino acid sequence set forth in SEQ ID NO: 105, but retains specific binding to a cancer antigen (e.g., CD19). In several embodiments, the light chain variable domain may have one or more additional mutations in the VL domain amino acid sequence set forth in SEQ ID NO: 105, but has improved specific binding to a cancer antigen (e.g., CD19).

[0451] In some embodiments, the antigen-binding protein comprises a heavy chain variable domain having the VH domain amino acid sequence set forth in SEQ ID NO: 104, and a light chain variable domain having the VL domain amino acid sequence set forth in SEQ ID NO: 105. In some embodiments, the light-chain variable domain comprises a sequence of amino acids that is at least 70%, 75%, 80%, 85%, 90%, 91%, 92%, 93%, 94%, 95%, 96%, 97%, 98%, 99%, or more, identical to the sequence of a light chain variable domain of SEQ ID NO: 105. In some embodiments, the heavy-chain variable domain comprises a sequence of amino acids that is at least 70%, 75%, 80%, 85%, 90%, 91%, 92%, 93%, 94%, 95%, 96%, 97%, 98%, 99%, or more, identical to the sequence of a heavy chain variable domain in accordance with SEQ ID NO: 104.

[0452] In some embodiments, the antigen-binding protein comprises a heavy chain variable comprising the amino acid sequence of SEQ ID NO: 106. In some embodiments, the antigen-binding protein comprises a heavy chain variable having at least 90% sequence identity to the VH amino acid sequence set forth in SEQ ID NO: 106. In some embodiments, the antigen-binding protein comprises a heavy chain variable having at least 95% sequence identity to the VH amino acid sequence set forth in SEQ ID NO: 106. In some embodiments, the antigen-binding protein comprises a heavy chain variable having at least 96, 97, 98, or 99% identity to the VH amino acid sequence set forth in SEQ ID NO: 106. In several embodiments, the heavy chain variable may have one or more additional mutations (e.g., for purposes of humanization) in the VH amino acid sequence set forth in SEQ ID NO: 106, but retains specific binding to a cancer antigen (e.g., CD19). In several embodiments, the heavy chain variable may have one or more additional mutations in the VH amino acid sequence set forth in SEQ ID NO: 106, but has improved specific binding to a cancer antigen (e.g., CD19).

[0453] In some embodiments, the antigen-binding protein comprises a light chain variable comprising the amino acid sequence of SEQ ID NO: 107. In some embodiments, the antigen-binding protein comprises a light chain variable region having at least 90% sequence identity to the VL amino acid sequence set forth in SEQ ID NO: 107. In some embodiments, the antigen-binding protein comprises a light chain variable having at least 95% sequence identity to the VL amino acid sequence set forth in SEQ ID NO: 107. In some embodiments, the antigen-binding protein comprises a light chain variable having at least 96, 97, 98, or 99% identity to the VL amino acid sequence set forth in SEQ ID NO: 107. In several embodiments, the light chain variable may have one or more additional mutations (e.g., for purposes of humanization) in the VL amino acid sequence set forth in SEQ ID NO: 107, but retains specific binding to a cancer antigen (e.g., CD19). In several embodiments, the light chain variable may have one or more additional mutations in the VL amino acid sequence set forth in SEQ ID NO: 107, but has improved specific binding to a cancer antigen (e.g., CD19).

[0454] In several embodiments, there is also provided an anti-CD19 binding moiety that comprises a light chain CDR comprising a first, second and third complementarity determining region (LC CDR1, LC CDR2, and LC CDR3, respectively. In several embodiments, the anti-CD19 binding moiety further comprises a heavy chain CDR comprising a first, second and third complementarity determining region (HC CDR1, HC CDR2, and HC CDR3, respectively. In several embodiments, the LC CDR1 comprises the sequence of SEQ ID NO. 108. In several embodiments, the LC CDR1 comprises an amino acid sequence with at least about 85%, about 90%, about 95%, or about 98% sequence identity to the sequence of SEQ NO. 108. In several embodiments, the LC CDR2 comprises the sequence of SEQ ID NO. 109. In several embodiments, the LC CDR2 comprises an amino acid sequence with at least about 85%, about 90%, about 95%, or about 98% sequence identity to the sequence of SEQ NO. 109. In several embodiments, the LC CDR3 comprises the sequence of SEQ ID NO. 110. In several embodiments, the LC CDR3 comprises an amino acid sequence with at least about 85%, about 90%, about 95%, or about 98% sequence identity to the sequence of SEQ NO. 110. In several embodiments, the HC CDR1 comprises the sequence of SEQ ID NO. 111. In several embodiments, the HC CDR1 comprises an amino acid sequence with at least about 85%, about 90%, about 95%, or about 98% sequence identity to the sequence of SEQ NO. 111. In several embodiments, the HC CDR2 comprises the sequence of SEQ ID NO. 112, 113, or 114. In several embodiments, the HC CDR2 comprises an amino acid sequence with at least about 85%, about 90%, about 95%, or about 98% sequence identity to the sequence of SEQ NO. 112, 113, or 114. In several embodiments, the HC CDR3 comprises the sequence of SEQ ID NO. 115. In several embodiments, the HC CDR3 comprises an amino acid sequence with at least about 85%, about 90%, about 95%, or about 98% sequence identity to the sequence of SEQ NO. 115. In several embodiments, the anti-CD19 binding moiety comprises SEQ ID NO: 116, or is sequence with at least about 85%, about 90%, about 95%, or about 98% sequence identity to the sequence of SEQ NO. 116.

[0455] In some embodiments, the antigen-binding protein comprises a light chain variable comprising the amino acid sequence of SEQ ID NO: 117, 118, or 119. In some embodiments, the antigen-binding protein comprises a light chain variable region having at least 90% identity to the VL amino acid sequence set forth in SEQ ID NO: 117, 118, or 119. In some embodiments, the antigen-binding protein comprises a light chain variable having at least 95% identity to the VL amino acid sequence set forth in SEQ ID NO: 117, 118, or 119. In some embodiments, the antigen-binding protein comprises a light chain variable having at least 96, 97, 98, or 99% identity to the VL amino acid sequence set forth in SEQ ID NO: 117, 118, or 119. In several embodiments, the light chain variable may have one or more additional mutations (e.g., for purposes of humanization) in the VL amino acid sequence set forth in SEQ ID NO: 117, 118, or 119, but retains specific binding to a cancer antigen (e.g., CD19). In several embodiments, the light chain variable may have one or more additional mutations in the VL amino acid sequence set forth in SEQ ID NO: 117, 118, or 119, but has improved specific binding to a cancer antigen (e.g., CD19).

[0456] In some embodiments, the antigen-binding protein comprises a heavy chain variable comprising the amino acid sequence of SEQ ID NO: 120,121, 122, or 123. In some embodiments, the antigen-binding protein comprises a heavy chain variable having at least 90% identity to the VH amino acid sequence set forth in SEQ ID NO: 120,121, 122, or 123. In some embodiments, the antigen-binding protein comprises a heavy chain variable having at least 95% identity to the VH amino acid sequence set forth in SEQ ID NO: 120,121, 122, or 123. In some embodiments, the antigen-binding protein comprises a heavy chain variable having at least 96, 97, 98, or 99% identity to the VH amino acid sequence set forth in SEQ ID NO: 120,121, 122, or 123. In several embodiments, the heavy chain variable may have one or more additional mutations (e.g., for purposes of humanization) in the VH amino acid sequence set forth in SEQ ID NO: 120,121, 122, or 123, but retains specific binding to a cancer antigen (e.g., CD19). In several embodiments, the heavy chain variable may have one or more additional mutations in the VH amino acid sequence set forth in SEQ ID NO: 120,121, 122, or 123, but has improved specific binding to a cancer antigen (e.g., CD19).

[0457] In several embodiments, there is also provided an anti-CD19 binding moiety that comprises a light chain CDR comprising a first, second and third complementarity determining region (LC CDR1, LC CDR2, and LC CDR3, respectively. In several embodiments, the anti-CD19 binding moiety further comprises a heavy chain CDR comprising a first, second and third complementarity determining region (HC CDR1, HC CDR2, and HC CDR3, respectively. In several embodiments, the LC CDR1 comprises the sequence of SEQ ID NO. 124, 127, or 130. In several embodiments, the LC CDR1 comprises an amino acid sequence with at least about 85%, about 90%, about 95%, or about 98% sequence identity to the sequence of SEQ NO. 124, 127, or 130. In several embodiments, the LC CDR2 comprises the sequence of SEQ ID NO. 125, 128, or 131. In several embodiments, the LC CDR2 comprises an amino acid sequence with at least about 85%, about 90%, about 95%, or about 98% sequence identity to the sequence of SEQ NO. 125, 128, or 131. In several embodiments, the LC CDR3 comprises the sequence of SEQ ID NO. 126, 129, or 132. In several embodiments, the LC CDR3 comprises an amino acid sequence with at least about 85%, about 90%, about 95%, or about 98% sequence identity to the sequence of SEQ NO. 126, 129, or 132. In several embodiments, the HC CDR1 comprises the sequence of SEQ ID NO. 133, 136, 139, or 142. In several embodiments, the HC CDR1 comprises an amino acid sequence with at least about 85%, about 90%, about 95%, or about 98% sequence identity to the sequence of SEQ NO. 133, 136, 139, or 142. In several embodiments, the HC CDR2 comprises the sequence of SEQ ID NO. 134, 137, 140, or 143. In several embodiments, the HC CDR2 comprises an amino acid sequence with at least about 85%, about 90%, about 95%, or about 98% sequence identity to the sequence of SEQ NO. 134, 137, 140, or 143. In several embodiments, the HC CDR3 comprises the sequence of SEQ ID NO. 135, 138, 141, or 144. In several embodiments, the HC CDR3 comprises an amino acid sequence with at least about 85%, about 90%, about 95%, or about 98% sequence identity to the sequence of SEQ NO. 135, 138, 141, or 144.

[0458] Additional anti-CD19 binding moieties are known in the art, such as those disclosed in, for example, U.S. Pat. No. 8,399,645, US Patent Publication No. 2018/0153977, US Patent Publication No. 2014/0271635, US Patent Publication No. 2018/0251514, US Patent Publication No. 2018/0312588, and WO 2020/180882, the entirety of each of which is incorporated by reference herein.

[0459] Several embodiments relate to CARs that are directed to Claudin 6, and show little or no binding to Claudin 3, 4, or 9 (or other Claudins). In some embodiments, the antigen-binding protein comprises a heavy chain variable comprising the amino acid sequence of SEQ ID NO: 88. In some embodiments, the antigen-binding protein comprises a heavy chain variable having at least 90% identity to the VH amino acid sequence set forth in SEQ ID NO: 88. In some embodiments, the antigen-binding protein comprises a heavy chain variable having at least 95% identity to the VH amino acid sequence set forth in SEQ ID NO: 88. In some embodiments, the antigen-binding protein comprises a heavy chain variable having at least 96, 97, 98, or 99% identity to the VH amino acid sequence set forth in SEQ ID NO: 88. In several embodiments, the heavy chain variable may have one or more additional mutations (e.g., for purposes of humanization) in the VH amino acid sequence set forth in SEQ ID NO: 88, but retains specific binding to a cancer antigen (e.g., CLDN6). In several embodiments, the heavy chain variable may have one or more additional mutations in the VH amino acid sequence set forth in SEQ ID NO: 88, but has improved specific binding to a cancer antigen (e.g., CLDN6).

[0460] In some embodiments, the antigen-binding protein comprises a light chain variable comprising the amino acid sequence of SEQ ID NO: 89, 90 or 91. In some embodiments, the antigen-binding protein comprises a light chain variable region having at least 90% identity to the VL amino acid sequence set forth in SEQ ID NO: 89, 90 or 91. In some embodiments, the antigen-binding protein comprises a light chain variable having at least 95% identity to the VL amino acid sequence set forth in SEQ ID NO: 89, 90 or 91. In some embodiments, the antigen-binding protein comprises a light chain variable having at least 96, 97, 98, or 99% identity to the VL amino acid sequence set forth in SEQ ID NO: 89, 90 or 91. In several embodiments, the light chain variable may have one or more additional mutations (e.g., for purposes of humanization) in the VL amino acid sequence set forth in SEQ ID NO: 89, 90 or 91, but retains specific binding to a cancer antigen (e.g., CLDN6). In several embodiments, the light chain variable may have one or more additional mutations in the VL amino acid sequence set forth in SEQ ID NO: 89, 90 or 91, but has improved specific binding to a cancer antigen (e.g., CLDN6).

[0461] In several embodiments, there is also provided an anti-CLDN6 binding moiety that comprises a light chain CDR comprising a first, second and third complementarity determining region (LC CDR1, LC CDR2, and LC CDR3, respectively. In several embodiments, the anti-CD19 binding moiety further comprises a heavy chain CDR comprising a first, second and third complementarity determining region (HC CDR1, HC CDR2, and HC CDR3, respectively. In several embodiments, the LC CDR1 comprises the sequence of SEQ ID NO. 95, 98, or 101. In several embodiments, the LC CDR1 comprises an amino acid sequence with at least about 85%, about 90%, about 95%, or about 98% sequence identity to the sequence of SEQ NO. 95, 98, or 101. In several embodiments, the LC CDR2 comprises the sequence of SEQ ID NO. 96, 99, or 102. In several embodiments, the LC CDR2 comprises an amino acid sequence with at least about 85%, about 90%, about 95%, or about 98% sequence identity to the sequence of SEQ NO. 96, 99, or 102. In several embodiments, the LC CDR3 comprises the sequence of SEQ ID NO. 97, 100, or 103. In several embodiments, the LC CDR3 comprises an amino acid sequence with at least about 85%, about 90%, about 95%, or about 98% sequence identity to the sequence of SEQ NO. 97, 100, or 103. In several embodiments, the HC CDR1 comprises the sequence of SEQ ID NO. 92. In several embodiments, the HC CDR1 comprises an amino acid sequence with at least about 85%, about 90%, about 95%, or about 98% sequence identity to the sequence of SEQ NO. 92. In several embodiments, the HC CDR2 comprises the sequence of SEQ ID NO. 93. In several embodiments, the HC CDR2 comprises an amino acid sequence with at least about 85%, about 90%, about 95%, or about 98% sequence identity to the sequence of SEQ NO. 93. In several embodiments, the HC CDR3 comprises the sequence of SEQ ID NO. 94. In several embodiments, the HC CDR3 comprises an amino acid sequence with at least about 85%, about 90%, about 95%, or about 98% sequence identity to the sequence of SEQ NO. 94. In several embodiments, the antigen-binding protein does not bind claudins other than CLDN6.

Natural Killer Group Domains that Bind Tumor Ligands

[0462] In several embodiments, engineered immune cells such as NK cells are leveraged for their ability to recognize and destroy tumor cells. For example, an engineered NK cell may include a CD19-directed chimeric antigen receptor or a nucleic acid encoding said chimeric antigen receptor (or a CAR directed against, for example, one or more of CD123, CD70, Her2, mesothelin, Claudin 6, BCMA, EGFR, etc.). NK cells express both inhibitory and activating receptors on the cell surface. Inhibitory receptors bind self-molecules expressed on the surface of healthy cells (thus preventing immune responses against “self” cells), while the activating receptors bind ligands expressed on abnormal cells, such as tumor cells. When the balance between inhibitory and activating receptor activation is in favor of activating receptors, NK cell activation occurs and target (e.g., tumor) cells are lysed.

[0463] Natural killer Group 2 member D (NKG2D) is an NK cell activating receptor that recognizes a variety of ligands expressed on cells. The surface expression of various NKG2D ligands is generally low in healthy cells but is upregulated upon, for example, malignant transformation. Non-limiting examples of ligands recognized by NKG2D include, but are not limited to, MICA, MICB, ULBP1, ULBP2, ULBP3, ULBP4, ULBP5, and ULBP6, as well as other molecules expressed on target cells that control the cytolytic or cytotoxic function of NK cells. In several embodiments, T cells are engineered to express an extracellular domain to binds to one or more tumor ligands and activate the T cell. For example, in several embodiments, T cells are engineered to express an NKG2D receptor as the binder/activation moiety. In several embodiments, engineered cells as disclosed herein are engineered to express another member of the NKG2 family, e.g., NKG2A, NKG2C, and/or NKG2E. Combinations of such receptors are engineered in some embodiments. Moreover, in several embodiments, other receptors are expressed, such as the Killer-cell immunoglobulin-like receptors (KIRs).

[0464] In several embodiments, cells are engineered to express a cytotoxic receptor complex comprising a full length NKG2D as an extracellular component to recognize ligands on the surface of tumor cells (e.g., liver cells). In one embodiment, full length NKG2D has the nucleic acid sequence of SEQ ID NO: 27. In several embodiments, the full length NKG2D, or functional fragment thereof is human NKG2D. Additional information about chimeric receptors for use in the presently disclosed methods and compositions can be found in PCT Patent Publication No. WO/2018/183385, which is incorporated in its entirety by reference herein.

[0465] In several embodiments, cells are engineered to express a cytotoxic receptor complex comprising a functional fragment of NKG2D as an extracellular component to recognize ligands on the surface of tumor cells or other diseased cells. In one embodiment, the functional fragment of NKG2D has the nucleic acid sequence of SEQ ID NO: 25. In several embodiments, the fragment of NKG2D is at least 70%, at least 75%, at least 80%, at least 85%, at least 90%, or at least 95% homologous with full-length wild-type NKG2D. In several embodiments, the fragment may have one or more additional mutations from SEQ ID NO: 25, but retains, or in some embodiments, has enhanced, ligand-binding function. In several embodiments, the functional fragment of NKG2D comprises the amino acid sequence of SEQ ID NO: 26. In several embodiments, the NKG2D fragment is provided as a dimer, trimer, or other concatameric format, such embodiments providing enhanced ligand-binding activity. In several embodiments, the sequence encoding the NKG2D fragment is optionally fully or partially codon optimized. In one embodiment, a sequence encoding a codon optimized NKG2D fragment comprises the sequence of SEQ ID NO: 28. Advantageously, according to several embodiments, the functional fragment lacks its native transmembrane or intracellular domains but retains its ability to bind ligands of NKG2D as well as transduce activation signals upon ligand binding. A further advantage of such fragments is that expression of DAP10 to localize NKG2D to the cell membrane is not required. Thus, in several embodiments, the cytotoxic receptor complex encoded by the polypeptides disclosed herein does not comprise DAP10. In several embodiments, immune cells, such as NK or T cells (e.g., non-alloreactive T cells engineered according to embodiments disclosed herein), are engineered to express one or more chimeric receptors that target, for example CD19, CD123, CD70, Her2, mesothelin, Claudin 6, BCMA, EGFR, and an NKG2D ligand, such as MICA, MICB, ULBP1, ULBP2, ULBP3, ULBP4, ULBP5, and/or ULBP6. Such cells, in several embodiments, also co-express mbIL15.

[0466] In several embodiments, the cytotoxic receptor complexes are configured to dimerize. Dimerization may comprise homodimers or heterodimers, depending on the embodiment. In several embodiments, dimerization results in improved ligand recognition by the cytotoxic receptor complexes (and hence the NK cells expressing the receptor), resulting in a reduction in (or lack) of adverse toxic effects. In several embodiments, the cytotoxic receptor complexes employ internal dimers, or repeats of one or more component subunits. For example, in several embodiments, the cytotoxic receptor complexes may optionally comprise a first NKG2D extracellular domain coupled to a second NKG2D extracellular domain, and a transmembrane/signaling region (or a separate transmembrane region along with a separate signaling region).

[0467] In several embodiments, the various domains/subdomains are separated by a linker such as, a GS3 linker (SEQ ID NO: 15 and 16, nucleotide and protein, respectively) is used (or a GSn linker). Other linkers used according to various embodiments disclosed herein include, but are not limited to those encoded by SEQ ID NO: 17, 19, 21 or 23. This provides the potential to separate the various component parts of the receptor complex along the polynucleotide, which can enhance expression, stability, and/or functionality of the receptor complex.

### Cytotoxic Signaling Complex

[0468] Some embodiments of the compositions and methods described herein relate to a chimeric receptor, such as a chimeric antigen receptor (e.g., a CAR directed to CD19, CD123, CD70, Her2, mesothelin, Claudin 6, BCMA, or EGFR (among others), or a chimeric receptor directed against an NKG2D ligand, such as MICA, MICB, ULBP1, ULBP2, ULBP3, ULBP4, ULBP5, and/or ULBP6) that includes a cytotoxic signaling complex. As disclosed herein, according to several embodiments, the provided cytotoxic receptor complexes comprise one or more transmembrane and/or intracellular domains that initiate cytotoxic signaling cascades upon the extracellular domain(s) binding to ligands on the surface of target cells.

[0469] In several embodiments, the cytotoxic signaling complex comprises at least one transmembrane domain, at least one co-stimulatory domain, and/or at least one signaling domain. In some embodiments, more than one component part makes up a given domain—e.g., a co-stimulatory domain may comprise two subdomains. Moreover, in some embodiments, a domain may serve multiple functions, for example, a transmembrane domain may also serve to provide signaling function.

### Transmembrane Domains

[0470] Some embodiments of the compositions and methods described herein relate to chimeric receptors (e.g., tumor antigen-directed CARs and/or ligand-directed chimeric receptors) that comprise a transmembrane domain. Some embodiments include a transmembrane domain from NKG2D or another transmembrane protein. In several embodiments in which a transmembrane domain is employed, the portion of the transmembrane protein employed retains at least a portion of its normal transmembrane domain.

[0471] In several embodiments, however, the transmembrane domain comprises at least a portion of CD8, a transmembrane glycoprotein normally expressed on both T cells and NK cells. In several embodiments, the transmembrane domain comprises CD8a. In several embodiments, the transmembrane domain is referred to as a “hinge”. In several embodiments, the “hinge” of CD8α has the nucleic acid sequence of SEQ ID NO: 1. In several embodiments, the CD8α hinge is truncated or modified and is at least 70%, at least 75%, at least 80%, at least 85%, at least 90%, at least 95% homologous with the CD8αhaving the sequence of SEQ ID NO: 1. In several embodiments, the “hinge” of CD8α comprises the amino acid sequence of SEQ ID NO: 2. In several embodiments, the CD8α can be truncated or modified, such that it is at least 70%, at least 75%, at least 80%, at least 85%, at least 90%, at least 95% homologous with the sequence of SEQ ID NO: 2.

[0472] In several embodiments, the transmembrane domain comprises a CD8α transmembrane region. In several embodiments, the CD8α transmembrane domain has the nucleic acid sequence of SEQ ID NO: 3. In several embodiments, the CD8α hinge is truncated or modified and is at least 70%, at least 75%, at least 80%, at least 85%, at least 90%, at least 95% homologous with the CD8α having the sequence of SEQ ID NO: 3. In several embodiments, the CD8α transmembrane domain comprises the amino acid sequence of SEQ ID NO: 4. In several embodiments, the CD8α hinge is truncated or modified and is at least 70%, at least 75%, at least 80%, at least 85%, at least 90%, at least 95% homologous with the CD8αhaving the sequence of SEQ ID NO: 4.

[0473] Taken together in several embodiments, the CD8 hinge/transmembrane complex is encoded by the nucleic acid sequence of SEQ ID NO: 13. In several embodiments, the CD8 hinge/transmembrane complex is truncated or modified and is at least 70%, at least 75%, at least 80%, at least 85%, at least 90%, at least 95% homologous with the CD8 hinge/transmembrane complex having the sequence of SEQ ID NO: 13. In several embodiments, the CD8 hinge/transmembrane complex comprises the amino acid sequence of SEQ ID NO: 14. In several embodiments, the CD8 hinge/transmembrane complex hinge is truncated or modified and is at least 70%, at least 75%, at least 80%, at least 85%, at least 90%, at least 95% homologous with the CD8 hinge/transmembrane complex having the sequence of SEQ ID NO: 14.

[0474] In some embodiments, the transmembrane domain comprises a CD28 transmembrane domain or a fragment thereof. In several embodiments, the CD28 transmembrane domain comprises the amino acid sequence of SEQ ID NO: 30. In several embodiments, the CD28 transmembrane domain complex hinge is truncated or modified and is at least 70%, at least 75%, at least 80%, at least 85%, at least 90%, at least 95% homologous with the CD28 transmembrane domain having the sequence of SEQ ID NO: 30.

### Co-Stimulatory Domains

[0475] Some embodiments of the compositions and methods described herein relate to chimeric receptors (e.g., tumor antigen-directed CARs and/or tumor ligand-directed chimeric receptors) that comprise a co-stimulatory domain. In addition the various the transmembrane domains and signaling domain (and the combination transmembrane/signaling domains), additional co-activating molecules can be provided, in several embodiments. These can be certain molecules that, for example, further enhance activity of the immune cells. Cytokines may be used in some embodiments. For example, certain interleukins, such as IL-2 and/or IL-15 as non-limiting examples, are used. In some embodiments, the immune cells for therapy are engineered to express such molecules as a secreted form. In additional embodiments, such co-stimulatory domains are engineered to be membrane bound, acting as autocrine stimulatory molecules (or even as paracrine stimulators to neighboring cells). In several embodiments, NK cells are engineered to express membrane-bound interleukin 15 (mbIL15). In such embodiments, mbIL15 expression on the NK enhances the cytotoxic effects of the engineered NK cell by enhancing the proliferation and/or longevity of the NK cells. In several embodiments, T cells, such as the genetically engineered non-alloreactive T cells disclosed herein are engineered to express membrane-bound interleukin 15 (mbIL15). In such embodiments, mbIL15 expression on the T cell enhances the cytotoxic effects of the engineered T cell by enhancing the activity and/or propagation (e.g., longevity) of the engineered T cells. In several embodiments, mbIL15 has the nucleic acid sequence of SEQ ID NO: 11. In several embodiments, mbIL15 can be truncated or modified, such that it is at least 70%, at least 75%, at least 80%, at least 85%, at least 90%, at least 95% homologous with the sequence of SEQ ID NO: 11. In several embodiments, the mbIL15 comprises the amino acid sequence of SEQ ID NO: 12. In several embodiments, the mbIL15 is truncated or modified and is at least 70%, at least 75%, at least 80%, at least 85%, at least 90%, at least 95% homologous with the mbIL15 having the sequence of SEQ ID NO: 12.

[0476] In some embodiments, the tumor antigen-directed CARs and/or tumor ligand-directed chimeric receptors are encoded by a polynucleotide that includes one or more cytosolic protease cleavage sites, for example a T2A cleavage site, a P2A cleavage site, an E2A cleavage site, and/or a F2A cleavage site. Such sites are recognized and cleaved by a cytosolic protease, which can result in separation (and separate expression) of the various component parts of the receptor encoded by the polynucleotide. As a result, depending on the embodiment, the various constituent parts of an engineered cytotoxic receptor complex can be delivered to an NK cell or T cell in a single vector or by multiple vectors. Thus, as shown schematically, in the Figures, a construct can be encoded by a single polynucleotide, but also include a cleavage site, such that downstream elements of the constructs are expressed by the cells as a separate protein (as is the case in some embodiments with IL-15). In several embodiments, a T2A cleavage site is used. In several embodiments, a T2A cleavage site has the nucleic acid sequence of SEQ ID NO: 9. In several embodiments, T2A cleavage site can be truncated or modified, such that it is at least 70%, at least 75%, at least 80%, at least 85%, at least 90%, at least 95% homologous with the sequence of SEQ ID NO: 9. In several embodiments, the T2A cleavage site comprises the amino acid sequence of SEQ ID NO: 10. In several embodiments, the T2A cleavage site is truncated or modified and is at least 70%, at least 75%, at least 80%, at least 85%, at least 90%, at least 95% homologous with the T2A cleavage site having the sequence of SEQ ID NO: 10.

### Signaling Domains

[0477] Some embodiments of the compositions and methods described herein relate to a chimeric receptor (e.g., tumor antigen-directed CARs and/or tumor ligand-directed chimeric receptors) that includes a signaling domain. For example, immune cells engineered according to several embodiments disclosed herein may comprise at least one subunit of the CD3 T cell receptor complex (or a fragment thereof). In several embodiments, the signaling domain comprises the CD3 zeta subunit. In several embodiments, the CD3 zeta is encoded by the nucleic acid sequence of SEQ ID NO: 7. In several embodiments, the CD3 zeta can be truncated or modified, such that it is at least 70%, at least 75%, at least 80%, at least 85%, at least 90%, at least 95% homologous with the CD3 zeta having the sequence of SEQ ID NO: 7. In several embodiments, the CD3 zeta domain comprises the amino acid sequence of SEQ ID NO: 8. In several embodiments, the CD3 zeta domain is truncated or modified and is at least 70%, at least 75%, at least 80%, at least 85%, at least 90%, at least 95% homologous with the CD3 zeta domain having the sequence of SEQ ID NO: 8.

[0478] In several embodiments, unexpectedly enhanced signaling is achieved through the use of multiple signaling domains whose activities act synergistically. For example, in several embodiments, the signaling domain further comprises an OX40 domain. In several embodiments, the OX40 domain is an intracellular signaling domain. In several embodiments, the OX40 intracellular signaling domain has the nucleic acid sequence of SEQ ID NO: 5. In several embodiments, the OX40 intracellular signaling domain can be truncated or modified, such that it is at least 70%, at least 75%, at least 80%, at least 85%, at least 90%, at least 95% homologous with the OX40 having the sequence of SEQ ID NO: 5. In several embodiments, the OX40 intracellular signaling domain comprises the amino acid sequence of SEQ ID NO: 6. In several embodiments, the OX40 intracellular signaling domain is truncated or modified and is at least 70%, at least 75%, at least 80%, at least 85%, at least 90%, at least 95% homologous with the OX40 intracellular signaling domain having the sequence of SEQ ID NO: 6. In several embodiments, OX40 is used as the sole transmembrane/signaling domain in the construct, however, in several embodiments, OX40 can be used with one or more other domains. For example, combinations of OX40 andCD3zeta are used in some embodiments. By way of further example, combinations of CD28, OX40, 4-1 BB, and/or CD3zeta are used in some embodiments.

[0479] In several embodiments, the signaling domain comprises a 4-1 BB domain. In several embodiments, the 4-1 BB domain is an intracellular signaling domain. In several embodiments, the 4-1 BB intracellular signaling domain comprises the amino acid sequence of SEQ ID NO: 29. In several embodiments, the 4-1 BB intracellular signaling domain is truncated or modified and is at least 70%, at least 75%, at least 80%, at least 85%, at least 90%, at least 95% homologous with the 4-1BB intracellular signaling domain having the sequence of SEQ ID NO: 29. In several embodiments, 4-1 BB is used as the sole transmembrane/signaling domain in the construct, however, in several embodiments, 4-1BB can be used with one or more other domains. For example, combinations of 4-1 BB andCD3zeta are used in some embodiments. By way of further example, combinations of CD28, OX40, 4-1 BB, and/or CD3zeta are used in some embodiments.

[0480] In several embodiments, the signaling domain comprises a CD28 domain. In several embodiments the CD28 domain is an intracellular signaling domain. In several embodiments, the CD28 intracellular signaling domain comprises the amino acid sequence of SEQ ID NO: 31. In several embodiments, the CD28 intracellular signaling domain is truncated or modified and is at least 70%, at least 75%, at least 80%, at least 85%, at least 90%, at least 95% homologous with the CD28 intracellular signaling domain having the sequence of SEQ ID NO: 31. In several embodiments, CD28 is used as the sole transmembrane/signaling domain in the construct, however, in several embodiments, CD28 can be used with one or more other domains. For example, combinations of CD28 andCD3zeta are used in some embodiments. By way of further example, combinations of CD28, OX40, 4-1 BB, and/or CD3zeta are used in some embodiments.

### Cytotoxic Receptor Complex Constructs

[0481] Some embodiments of the compositions and methods described herein relate to chimeric antigen receptors, such as a CD19-directed chimeric receptor, as well as chimeric receptors, such as an activating chimeric receptor (ACR) that targets ligands of NKG2D. The expression of these cytotoxic receptors complexes in immune cells, such as genetically modified non-alloreactive T cells and/or NK cells, allows the targeting and destruction of particular target cells, such as cancerous cells. Non-limiting examples of such cytotoxic receptor complexes are discussed in more detail below.

### Chimeric Antigen Receptor Cytotoxic Receptor Complex Constructs

[0482] In several embodiments, there are provided for herein a variety of cytotoxic receptor complexes (also referred to as cytotoxic receptors) are provided for herein with the general structure of a chimeric antigen receptor. FIGS. 1-7 schematically depict non-limiting schematics of constructs that include an tumor binding moiety that binds to tumor antigens or tumor-associated antigens expressed on the surface of cancer cells and activates the engineered cell expressing the chimeric antigen receptor. FIG. 6 shows a schematic of a chimeric receptor complex, with an NKG2D activating chimeric receptor as a non-limiting example (see NKG2D ACRa and ACRb). FIG. 6 shows a schematic of a bispecific CAR/chimeric receptor complex, with an NKG2D activating chimeric receptor as a non-limiting example (see Bi-spec CAR/ACRa and CAR/ACRb).

[0483] As shown in the figures, several embodiments of the chimeric receptor include an anti-tumor binder, a CD8α hinge domain, an Ig4 SH domain (or hinge), a CD8α transmembrane domain, a CD28 transmembrane domain, an OX40 domain, a 4-1BB domain, a CD28 domain, a CD3(ITAM domain or subdomain, a CD3zeta domain, an NKp80 domain, a CD16 IC domain, a 2A cleavage site, and a membrane-bound IL-15 domain (though, as above, in several embodiments soluble IL-15 is used). In several embodiments, the binding and activation functions are engineered to be performed by separate domains. Several embodiments relate to complexes with more than one tumor binder moiety or other binder/activation moiety. In some embodiments, the binder/activation moiety targets other markers besides CD19, such as a cancer target described herein. For example, FIGS. 6 and 7 depict schematics of non-limiting examples of CAR constructs that target different antigens, such as CD123, CLDN6, BCMA, HER2, CD70, Mesothelia, PD-L1, and EGFR. In several embodiments, the general structure of the chimeric antigen receptor construct includes a hinge and/or transmembrane domain. These may, in some embodiments, be fulfilled by a single domain, or a plurality of subdomains may be used, in several embodiments. The receptor complex further comprises a signaling domain, which transduces signals after binding of the homing moiety to the target cell, ultimately leading to the cytotoxic effects on the target cell. In several embodiments, the complex further comprises a co-stimulatory domain, which operates, synergistically, in several embodiments, to enhance the function of the signaling domain. Expression of these complexes in immune cells, such as T cells and/or NK cells, allows the targeting and destruction of particular target cells, such as cancerous cells that express a given tumor marker. Some such receptor complexes comprise an extracellular domain comprising an anti-CD19 moiety, or CD19-binding moiety, that binds CD19 on the surface of target cells and activates the engineered cell. The CD3zeta ITAM subdomain may act in concert as a signaling domain. The IL-15 domain, e.g., mblL-15 domain, may act as a co-stimulatory domain. The IL-15 domain, e.g. mblL-15 domain, may render immune cells (e.g., NK or T cells) expressing it particularly efficacious against target tumor cells. It shall be appreciated that the IL-15 domain, such as an mblL-15 domain, can, in accordance with several embodiments, be encoded on a separate construct. Additionally, each of the components may be encoded in one or more separate constructs. In some embodiments, the cytotoxic receptor or CD19-directed receptor comprises a sequence of amino acids that is at least 70%, 75%, 80%, 85%, 90%, 91%, 92%, 93%, 94%, 95%, 96%, 97%, 98%, 99%, or more, or a range defined by any two of the aforementioned percentages, identical to the sequence of SEQ ID NO: 34.

[0484] Depending on the embodiment, various binders can be used to target CD19. In several embodiments, peptide binders are used, while in some embodiments antibodies, or fragments thereof are used. In several embodiments employing antibodies, antibody sequences are optimized, humanized or otherwise manipulated or mutated from their native form in order to increase one or more of stability, affinity, avidity or other characteristic of the antibody or fragment. In several embodiments, an antibody is provided that is specific for CD19. In several embodiments, an scFv is provided that is specific for CD19. In several embodiments, the antibody or scFv specific for CD19 comprises a heavy chain variable comprising the amino acid sequence of SEQ ID NO: 104 or 106. In some embodiments, the heavy chain variable comprises a sequence of amino acids that is at least 70%, 75%, 80%, 85%, 90%, 91%, 92%, 93%, 94%, 95%, 96%, 97%, 98%, 99%, or more, identical to the sequence of SEQ ID NO. 104 or 106. In some embodiments, the heavy chain variable comprises a sequence of amino acids that is encoded by a polynucleotide that hybridizes under moderately stringent conditions to the complement of a polynucleotide that encodes a heavy chain variable of SEQ ID NO. 104 or 106. In some embodiments, the heavy chain variable domain a sequence of amino acids that is encoded by a polynucleotide that hybridizes under stringent conditions to the complement of a polynucleotide that encodes a heavy chain variable encodes a heavy chain variable of SEQ ID NO. 104 or 106.

[0485] In several embodiments, the antibody or scFv specific for CD19 comprises a light chain variable comprising the amino acid sequence of any of SEQ ID NO. 105 or 107. In several embodiments, the light chain variable comprises a sequence of amino acids that is encoded by a nucleotide sequence that is at least 70%, 75%, 80%, 85%, 90%, 91%, 92%, 93%, 94%, 95%, 96%, 97%, 98%, 99%, or more, identical to the identical to the sequence of SEQ ID NO. 105 or 107. In some embodiments, the light chain variable comprises a sequence of amino acids that is encoded by a polynucleotide that hybridizes under moderately stringent conditions to the complement of a polynucleotide that encodes a light chain variable of SEQ ID NO. 105 or 107. In some embodiments, the light chain variable domain comprises a sequence of amino acids that is encoded by a polynucleotide that hybridizes under stringent conditions to the complement of a polynucleotide that encodes a light chain variable domain of SEQ ID NO. 105 or 107.

[0486] In several embodiments, the anti-CD19 antibody or scFv comprises one, two, or three heavy chain complementarity determining region (CDR) and one, two, or three light chain CDRs. In several embodiments, a first heavy chain CDR has the amino acid sequence of SEQ ID NO: 111. In some embodiments, the first heavy chain CDR comprises a sequence of amino acids that is at least 70%, 75%, 80%, 85%, 90%, 91%, 92%, 93%, 94%, 95%, 96%, 97%, 98%, 99%, or more, identical to the sequence of SEQ ID NO. 111. In several embodiments, a second heavy chain CDR has the amino acid sequence of SEQ ID NO: 112, 113, or 114. In some embodiments, the second heavy chain CDR comprises a sequence of amino acids that is at least 70%, 75%, 80%, 85%, 90%, 91%, 92%, 93%, 94%, 95%, 96%, 97%, 98%, 99%, or more, identical to the sequence of SEQ ID NO. 112, 113, or 114. In several embodiments, a third heavy chain CDR has the amino acid sequence of SEQ ID NO: 115. In some embodiments, the third heavy chain CDR comprises a sequence of amino acids that is at least 70%, 75%, 80%, 85%, 90%, 91%, 92%, 93%, 94%, 95%, 96%, 97%, 98%, 99%, or more, identical to the sequence of SEQ ID NO. 115.

[0487] In several embodiments, a first light chain CDR has the amino acid sequence of SEQ ID NO: 108. In some embodiments, the first light chain CDR comprises a sequence of amino acids that is at least 70%, 75%, 80%, 85%, 90%, 91%, 92%, 93%, 94%, 95%, 96%, 97%, 98%, 99%, or more, identical to the sequence of SEQ ID NO. 108. In several embodiments, a second light chain CDR has the amino acid sequence of SEQ ID NO: 109. In some embodiments, the second light chain CDR comprises a sequence of amino acids that is at least 70%, 75%, 80%, 85%, 90%, 91%, 92%, 93%, 94%, 95%, 96%, 97%, 98%, 99%, or more, identical to the sequence of SEQ ID NO. 109. In several embodiments, a third light chain CDR has the amino acid sequence of SEQ ID NO: 110. In some embodiments, the third light chain CDR comprises a sequence of amino acids that is at least 70%, 75%, 80%, 85%, 90%, 91%, 92%, 93%, 94%, 95%, 96%, 97%, 98%, 99% or more, identical to the sequence of SEQ ID NO. 110.

[0488] In several embodiments, there is provided an anti-CD19 CAR comprising the amino acid sequence of SEQ ID NO. 116. In some embodiments, there is provided an anti-CD19 CAR comprising a sequence of amino acids that is at least 70%, 75%, 80%, 85%, 90%, 91%, 92%, 93%, 94%, 95%, 96%, 97%, 98%, 99% or more, identical to the sequence of SEQ ID NO. 116.

[0489] In one embodiment, there is provided a polynucleotide encoding a Tumor Binder/CD8hinge-CD8TM/OX40/CD3zeta chimeric antigen receptor complex (see FIG. 1, CAR1c). The polynucleotide comprises or is composed of tumor binder, a CD8α hinge, a CD8α transmembrane domain, an OX40 domain, and a CD3zeta domain as described herein. In several embodiments, this receptor complex is encoded by a nucleic acid molecule comprising a sequence obtained from a combination of sequences disclosed herein, or comprises an amino acid sequence obtained from a combination of sequences disclosed herein. In several embodiments, the encoding nucleic acid sequence, or the amino acid sequence, comprises a sequence in accordance with one or more SEQ ID NOS as described herein, such as those included herein as examples of constituent parts. In several embodiments, the encoding nucleic acid sequence, or the amino acid sequence, comprises a sequence that shares at least about 90%, at least about 94%, at least about 95%, at least about 96%, at least about 97%, at least about 98%, or at least about 99%, sequence identity, homology and/or functional equivalence with a sequence resulting from the combination one or more SEQ ID NOS as described herein. It shall be appreciated that certain sequence variability, extensions, and/or truncations of the disclosed sequences may result when combining sequences, as a result of, for example, ease or efficiency in cloning (e.g., for creation of a restriction site).

[0490] In several embodiments, there is provided a polynucleotide encoding a tumor binder/CD8hinge-CD8TM/OX40/CD3zeta/2A/mIL-15 chimeric antigen receptor complex (see FIG. 1, CAR 1d). The polynucleotide comprises or is composed of a Tumor Binder, a CD8α hinge, a CD8α transmembrane domain, an OX40 domain, a CD3zeta domain, a 2A cleavage site, and an mIL-15 domain as described herein. In several embodiments, this receptor complex is encoded by a nucleic acid molecule comprising a sequence obtained from a combination of sequences disclosed herein, or comprises an amino acid sequence obtained from a combination of sequences disclosed herein. In several embodiments, the encoding nucleic acid sequence, or the amino acid sequence, comprises a sequence in accordance with one or more SEQ ID NOS as described herein, such as those included herein as examples of constituent parts. In several embodiments, the encoding nucleic acid sequence, or the amino acid sequence, comprises a sequence that shares at least about 90%, at least about 94%, at least about 95%, at least about 96%, at least about 97%, at least about 98%, or at least about 99%, sequence identity, homology and/or functional equivalence with a sequence resulting from the combination one or more SEQ ID NOS as described herein. It shall be appreciated that certain sequence variability, extensions, and/or truncations of the disclosed sequences may result when combining sequences, as a result of, for example, ease or efficiency in cloning (e.g., for creation of a restriction site).

[0491] In several embodiments, there is provided a polynucleotide encoding a Tumor Binder/Ig4SH-CD8TM/4-1 BB/CD3zeta chimeric antigen receptor complex (see FIG. 4,CAR4a). The polynucleotide comprises or is composed of a Tumor Binder, an Ig4 SH domain, a CD8α transmembrane domain, a 4-1 BB domain, and a CD3zeta domain as described herein. In several embodiments, this receptor complex is encoded by a nucleic acid molecule comprising a sequence obtained from a combination of sequences disclosed herein, or comprises an amino acid sequence obtained from a combination of sequences disclosed herein. In several embodiments, the encoding nucleic acid sequence, or the amino acid sequence, comprises a sequence in accordance with one or more SEQ ID NOS as described herein, such as those included herein as examples of constituent parts. In several embodiments, the encoding nucleic acid sequence, or the amino acid sequence, comprises a sequence that shares at least about 90%, at least about 94%, at least about 95%, at least about 96%, at least about 97%, at least about 98%, or at least about 99%, sequence identity, homology and/or functional equivalence with a sequence resulting from the combination one or more SEQ ID NOS as described herein. It shall be appreciated that certain sequence variability, extensions, and/or truncations of the disclosed sequences may result when combining sequences, as a result of, for example, ease or efficiency in cloning (e.g., for creation of a restriction site).

[0492] In several embodiments, there is provided a polynucleotide encoding a Tumor Binder/Ig4SH-CD8TM/4-1 BB/CD3zeta/2A/mIL-15 chimeric antigen receptor complex (see FIG. 4, CAR4b). The polynucleotide comprises or is composed of a Tumor Binder, a Ig4 SH domain, a CD8α transmembrane domain, a 4-1BB domain, a CD3zeta domain, a 2A cleavage site, and an mIL-15 domain as described herein. In several embodiments, this receptor complex is encoded by a nucleic acid molecule comprising a sequence obtained from a combination of sequences disclosed herein, or comprises an amino acid sequence obtained from a combination of sequences disclosed herein. In several embodiments, the encoding nucleic acid sequence, or the amino acid sequence, comprises a sequence in accordance with one or more SEQ ID NOS as described herein, such as those included herein as examples of constituent parts. In several embodiments, the encoding nucleic acid sequence, or the amino acid sequence, comprises a sequence that shares at least about 90%, at least about 94%, at least about 95%, at least about 96%, at least about 97%, at least about 98%, or at least about 99%, sequence identity, homology and/or functional equivalence with a sequence resulting from the combination one or more SEQ ID NOS as described herein. It shall be appreciated that certain sequence variability, extensions, and/or truncations of the disclosed sequences may result when combining sequences, as a result of, for example, ease or efficiency in cloning (e.g., for creation of a restriction site).

[0493] In several embodiments, there is provided a polynucleotide encoding a Tumor Binder/CD8hinge-CD28TM/CD28/CD3zeta chimeric antigen receptor complex (see FIG. 1, CAR1e). The polynucleotide comprises or is composed of a Tumor Binder, a CD8α hinge, a CD28 transmembrane domain, a CD28 domain, and a CD3zeta domain as described herein. In several embodiments, this receptor complex is encoded by a nucleic acid molecule comprising a sequence obtained from a combination of sequences disclosed herein, or comprises an amino acid sequence obtained from a combination of sequences disclosed herein. In several embodiments, the encoding nucleic acid sequence, or the amino acid sequence, comprises a sequence in accordance with one or more SEQ ID NOS as described herein, such as those included herein as examples of constituent parts. In several embodiments, the encoding nucleic acid sequence, or the amino acid sequence, comprises a sequence that shares at least about 90%, at least about 94%, at least about 95%, at least about 96%, at least about 97%, at least about 98%, or at least about 99%, sequence identity, homology and/or functional equivalence with a sequence resulting from the combination one or more SEQ ID NOS as described herein. It shall be appreciated that certain sequence variability, extensions, and/or truncations of the disclosed sequences may result when combining sequences, as a result of, for example, ease or efficiency in cloning (e.g., for creation of a restriction site).

[0494] In several embodiments, there is provided a polynucleotide encoding a Tumor Binder/CD8hinge-CD28TM/CD28/CD3zeta/2A/mIL-15 chimeric antigen receptor complex (see FIG. 1, CAR1f). The polynucleotide comprises or is composed of a Tumor Binder, a CD8α hinge, a CD28 transmembrane domain, a CD28 domain, a CD3zeta domain, a 2A cleavage site, and an mIL-15 domain as described herein. In several embodiments, this receptor complex is encoded by a nucleic acid molecule comprising a sequence obtained from a combination of sequences disclosed herein, or comprises an amino acid sequence obtained from a combination of sequences disclosed herein. In several embodiments, the encoding nucleic acid sequence, or the amino acid sequence, comprises a sequence in accordance with one or more SEQ ID NOS as described herein, such as those included herein as examples of constituent parts. In several embodiments, the encoding nucleic acid sequence, or the amino acid sequence, comprises a sequence that shares at least about 90%, at least about 94%, at least about 95%, at least about 96%, at least about 97%, at least about 98%, or at least about 99%, sequence identity, homology and/or functional equivalence with a sequence resulting from the combination one or more SEQ ID NOS as described herein.

[0495] It shall be appreciated that certain sequence variability, extensions, and/or truncations of the disclosed sequences may result when combining sequences, as a result of, for example, ease or efficiency in cloning (e.g., for creation of a restriction site).

[0496] In several embodiments, there is provided a polynucleotide encoding a Tumor Binder/Ig4SH-CD28TM/CD28/CD3zeta chimeric antigen receptor complex (see FIG. 2, CAR2i). The polynucleotide comprises or is composed of a Tumor Binder, an Ig4 SH domain, a CD28 transmembrane domain, a CD28 domain, and a CD3zeta domain as described herein. In several embodiments, this receptor complex is encoded by a nucleic acid molecule comprising a sequence obtained from a combination of sequences disclosed herein, or comprises an amino acid sequence obtained from a combination of sequences disclosed herein. In several embodiments, the encoding nucleic acid sequence, or the amino acid sequence, comprises a sequence in accordance with one or more SEQ ID NOS as described herein, such as those included herein as examples of constituent parts. In several embodiments, the encoding nucleic acid sequence, or the amino acid sequence, comprises a sequence that shares at least about 90%, at least about 94%, at least about 95%, at least about 96%, at least about 97%, at least about 98%, or at least about 99%, sequence identity, homology and/or functional equivalence with a sequence resulting from the combination one or more SEQ ID NOS as described herein. It shall be appreciated that certain sequence variability, extensions, and/or truncations of the disclosed sequences may result when combining sequences, as a result of, for example, ease or efficiency in cloning (e.g., for creation of a restriction site).

[0497] In several embodiments, there is provided a polynucleotide encoding a Tumor Binder/Ig4SH-CD28TM/CD28/CD3zeta/2A/mIL-15 chimeric antigen receptor complex (see FIG. 2, CAR2j). The polynucleotide comprises or is composed of a Tumor Binder, an Ig4 SH domain, a CD28 transmembrane domain, a CD28 domain, a CD3zeta domain, a 2A cleavage site, and an mIL-15 domain as described herein. In several embodiments, this receptor complex is encoded by a nucleic acid molecule comprising a sequence obtained from a combination of sequences disclosed herein, or comprises an amino acid sequence obtained from a combination of sequences disclosed herein. In several embodiments, the encoding nucleic acid sequence, or the amino acid sequence, comprises a sequence in accordance with one or more SEQ ID NOS as described herein, such as those included herein as examples of constituent parts. In several embodiments, the encoding nucleic acid sequence, or the amino acid sequence, comprises a sequence that shares at least about 90%, at least about 94%, at least about 95%, at least about 96%, at least about 97%, at least about 98%, or at least about 99%, sequence identity, homology and/or functional equivalence with a sequence resulting from the combination one or more SEQ ID NOS as described herein. It shall be appreciated that certain sequence variability, extensions, and/or truncations of the disclosed sequences may result when combining sequences, as a result of, for example, ease or efficiency in cloning (e.g., for creation of a restriction site).

[0498] In several embodiments, there is provided a polynucleotide encoding a Tumor Binder/Ig4SH-CD8TM/OX40/CD3zeta chimeric antigen receptor complex (see FIG. 4, CAR4c). The polynucleotide comprises or is composed of a Tumor Binder, a Ig4 SH domain, a CD8α transmembrane domain, an OX40 domain, and a CD3zeta domain as described herein. In several embodiments, this receptor complex is encoded by a nucleic acid molecule comprising a sequence obtained from a combination of sequences disclosed herein, or comprises an amino acid sequence obtained from a combination of sequences disclosed herein. In several embodiments, the encoding nucleic acid sequence, or the amino acid sequence, comprises a sequence in accordance with one or more SEQ ID NOS as described herein, such as those included herein as examples of constituent parts. In several embodiments, the encoding nucleic acid sequence, or the amino acid sequence, comprises a sequence that shares at least about 90%, at least about 94%, at least about 95%, at least about 96%, at least about 97%, at least about 98%, or at least about 99%, sequence identity, homology and/or functional equivalence with a sequence resulting from the combination one or more SEQ ID NOS as described herein. It shall be appreciated that certain sequence variability, extensions, and/or truncations of the disclosed sequences may result when combining sequences, as a result of, for example, ease or efficiency in cloning (e.g., for creation of a restriction site).

[0499] In several embodiments, there is provided a polynucleotide encoding a Tumor Binder/Ig4SH-CD8TM/OX40/CD3zeta/2A/mIL-15 chimeric antigen receptor complex (see FIG. 4, CAR4d). The polynucleotide comprises or is composed of a Tumor Binder, a Ig4 SH domain, a CD8α transmembrane domain, an OX40 domain, a CD3zeta domain, a 2A cleavage site, and an mIL-15 domain as described herein. In several embodiments, this receptor complex is encoded by a nucleic acid molecule comprising a sequence obtained from a combination of sequences disclosed herein, or comprises an amino acid sequence obtained from a combination of sequences disclosed herein. In several embodiments, the encoding nucleic acid sequence, or the amino acid sequence, comprises a sequence in accordance with one or more SEQ ID NOS as described herein, such as those included herein as examples of constituent parts. In several embodiments, the encoding nucleic acid sequence, or the amino acid sequence, comprises a sequence that shares at least about 90%, at least about 94%, at least about 95%, at least about 96%, at least about 97%, at least about 98%, or at least about 99%, sequence identity, homology and/or functional equivalence with a sequence resulting from the combination one or more SEQ ID NOS as described herein. It shall be appreciated that certain sequence variability, extensions, and/or truncations of the disclosed sequences may result when combining sequences, as a result of, for example, ease or efficiency in cloning (e.g., for creation of a restriction site).

[0500] In several embodiments, there is provided a polynucleotide encoding a Tumor Binder/CD8hinge-CD3aTM/CD28/CD3zeta chimeric antigen receptor complex (see FIG. 4, CAR4e). The polynucleotide comprises or is composed of a Tumor Binder, a CD8α hinge, a CD3a transmembrane domain, a CD28 domain, and a CD3zeta domain as described herein. In several embodiments, this receptor complex is encoded by a nucleic acid molecule comprising a sequence obtained from a combination of sequences disclosed herein, or comprises an amino acid sequence obtained from a combination of sequences disclosed herein. In several embodiments, the encoding nucleic acid sequence, or the amino acid sequence, comprises a sequence in accordance with one or more SEQ ID NOS as described herein, such as those included herein as examples of constituent parts. In several embodiments, the encoding nucleic acid sequence, or the amino acid sequence, comprises a sequence that shares at least about 90%, at least about 94%, at least about 95%, at least about 96%, at least about 97%, at least about 98%, or at least about 99%, sequence identity, homology and/or functional equivalence with a sequence resulting from the combination one or more SEQ ID NOS as described herein. It shall be appreciated that certain sequence variability, extensions, and/or truncations of the disclosed sequences may result when combining sequences, as a result of, for example, ease or efficiency in cloning (e.g., for creation of a restriction site).

[0501] In several embodiments, there is provided a polynucleotide encoding a Tumor Binder/CD8hinge-CD3aTM/CD28/CD3zeta/2A/mIL-15 chimeric antigen receptor complex (see FIG. 4, CAR4f). The polynucleotide comprises or is composed of a Tumor Binder, a CD8α hinge, a CD3a transmembrane domain, a CD28 domain, a CD3zeta domain, a 2A cleavage site, and an mIL-15 domain as described herein. In several embodiments, this receptor complex is encoded by a nucleic acid molecule comprising a sequence obtained from a combination of sequences disclosed herein, or comprises an amino acid sequence obtained from a combination of sequences disclosed herein. In several embodiments, the encoding nucleic acid sequence, or the amino acid sequence, comprises a sequence in accordance with one or more SEQ ID NOS as described herein, such as those included herein as examples of constituent parts. In several embodiments, the encoding nucleic acid sequence, or the amino acid sequence, comprises a sequence that shares at least about 90%, at least about 94%, at least about 95%, at least about 96%, at least about 97%, at least about 98%, or at least about 99%, sequence identity, homology and/or functional equivalence with a sequence resulting from the combination one or more SEQ ID NOS as described herein. It shall be appreciated that certain sequence variability, extensions, and/or truncations of the disclosed sequences may result when combining sequences, as a result of, for example, ease or efficiency in cloning (e.g., for creation of a restriction site).

[0502] In several embodiments, there is provided a polynucleotide encoding a Tumor Binder/CD8hinge-CD28TM/CD28/4-1 BB/CD3zeta chimeric antigen receptor complex (see FIG. 4, CAR 4g). The polynucleotide comprises or is composed of a Tumor Binder, a CD8α hinge, a CD28 transmembrane domain, a CD28 domain, a 4-1 BB domain, and a CD3zeta domain as described herein. In several embodiments, this receptor complex is encoded by a nucleic acid molecule comprising a sequence obtained from a combination of sequences disclosed herein, or comprises an amino acid sequence obtained from a combination of sequences disclosed herein. In several embodiments, the encoding nucleic acid sequence, or the amino acid sequence, comprises a sequence in accordance with one or more SEQ ID NOS as described herein, such as those included herein as examples of constituent parts. In several embodiments, the encoding nucleic acid sequence, or the amino acid sequence, comprises a sequence that shares at least about 90%, at least about 94%, at least about 95%, at least about 96%, at least about 97%, at least about 98%, or at least about 99%, sequence identity, homology and/or functional equivalence with a sequence resulting from the combination one or more SEQ ID NOS as described herein. It shall be appreciated that certain sequence variability, extensions, and/or truncations of the disclosed sequences may result when combining sequences, as a result of, for example, ease or efficiency in cloning (e.g., for creation of a restriction site).

[0503] In several embodiments, there is provided a polynucleotide encoding a Tumor Binder/CD8hinge-CD28TM/CD28/4-1 BB/CD3zeta/2A/mIL-15 chimeric antigen receptor complex (see FIG. 4, CAR 4h). The polynucleotide comprises or is composed of a Tumor Binder, a CD8α hinge, a CD28 transmembrane domain, a CD28 domain, a 4-1 BB domain, a CD3zeta domain, a 2A cleavage site, and an mIL-15 domain as described herein. In several embodiments, this receptor complex is encoded by a nucleic acid molecule comprising a sequence obtained from a combination of sequences disclosed herein, or comprises an amino acid sequence obtained from a combination of sequences disclosed herein. In several embodiments, the encoding nucleic acid sequence, or the amino acid sequence, comprises a sequence in accordance with one or more SEQ ID NOS as described herein, such as those included herein as examples of constituent parts. In several embodiments, the encoding nucleic acid sequence, or the amino acid sequence, comprises a sequence that shares at least about 90%, at least about 94%, at least about 95%, at least about 96%, at least about 97%, at least about 98%, or at least about 99%, sequence identity, homology and/or functional equivalence with a sequence resulting from the combination one or more SEQ ID NOS as described herein. It shall be appreciated that certain sequence variability, extensions, and/or truncations of the disclosed sequences may result when combining sequences, as a result of, for example, ease or efficiency in cloning (e.g., for creation of a restriction site).

[0504] In several embodiments, there is provided a polynucleotide encoding a Tumor Binder/CD8 alpha hinge/CD8 alpha TM/4-1 BB/CD3zeta chimeric antigen receptor complex (see FIG. 5, CAR5a). The polynucleotide comprises or is composed of an anti-CD19 moiety, a CD8α hinge, a CD8α transmembrane domain, a 4-1 BB domain, and a CD3zeta domain as described herein. In several embodiments, this receptor complex is encoded by a nucleic acid molecule comprising a sequence obtained from a combination of sequences disclosed herein, or comprises an amino acid sequence obtained from a combination of sequences disclosed herein. In several embodiments, the encoding nucleic acid sequence, or the amino acid sequence, comprises a sequence in accordance with one or more SEQ ID NOS as described herein, such as those included herein as examples of constituent parts. In several embodiments, the encoding nucleic acid sequence, or the amino acid sequence, comprises a sequence that shares at least about 90%, at least about 94%, at least about 95%, at least about 96%, at least about 97%, at least about 98%, or at least about 99%, sequence identity, homology and/or functional equivalence with a sequence resulting from the combination one or more SEQ ID NOS as described herein. It shall be appreciated that certain sequence variability, extensions, and/or truncations of the disclosed sequences may result when combining sequences, as a result of, for example, ease or efficiency in cloning (e.g., for creation of a restriction site).

[0505] In several embodiments, there is provided a polynucleotide encoding a Tumor Binder/CD8 alpha hinge/CD8 alpha TM/4-1BB/CD3zeta/2A/mIL-15 chimeric antigen receptor complex (see FIG. 5, CAR 5b). The polynucleotide comprises or is composed of a Tumor Binder, a CD8α hinge, a CD8αtransmembrane domain, a 4-1 BB domain, a CD3zeta domain, a 2A cleavage site, and an mIL-15 domain as described herein. In several embodiments, this receptor complex is encoded by a nucleic acid molecule comprising a sequence obtained from a combination of sequences disclosed herein, or comprises an amino acid sequence obtained from a combination of sequences disclosed herein. In several embodiments, the encoding nucleic acid sequence, or the amino acid sequence, comprises a sequence in accordance with one or more SEQ ID NOS as described herein, such as those included herein as examples of constituent parts. In several embodiments, the encoding nucleic acid sequence, or the amino acid sequence, comprises a sequence that shares at least about 90%, at least about 94%, at least about 95%, at least about 96%, at least about 97%, at least about 98%, or at least about 99%, sequence identity, homology and/or functional equivalence with a sequence resulting from the combination one or more SEQ ID NOS as described herein. It shall be appreciated that certain sequence variability, extensions, and/or truncations of the disclosed sequences may result when combining sequences, as a result of, for example, ease or efficiency in cloning (e.g., for creation of a restriction site).

[0506] In several embodiments, there is provided a polynucleotide encoding a Tumor Binder/CD8 alpha hinge/CD3 TM/4-1 BB/CD3zeta chimeric antigen receptor complex (see FIG. 5, CAR5c). The polynucleotide comprises or is composed of a Tumor Binder, a CD8α hinge, a CD3 transmembrane domain, a 4-1BB domain, and a CD3zeta domain as described herein. In several embodiments, this receptor complex is encoded by a nucleic acid molecule comprising a sequence obtained from a combination of sequences disclosed herein, or comprises an amino acid sequence obtained from a combination of sequences disclosed herein. In several embodiments, the encoding nucleic acid sequence, or the amino acid sequence, comprises a sequence in accordance with one or more SEQ ID NOS as described herein, such as those included herein as examples of constituent parts. In several embodiments, the encoding nucleic acid sequence, or the amino acid sequence, comprises a sequence that shares at least about 90%, at least about 94%, at least about 95%, at least about 96%, at least about 97%, at least about 98%, or at least about 99%, sequence identity, homology and/or functional equivalence with a sequence resulting from the combination one or more SEQ ID NOS as described herein. It shall be appreciated that certain sequence variability, extensions, and/or truncations of the disclosed sequences may result when combining sequences, as a result of, for example, ease or efficiency in cloning (e.g., for creation of a restriction site).

[0507] In several embodiments, there is provided a polynucleotide encoding a Tumor Binder/CD8 alpha hinge/CD3 TM/4-1 BB/CD3zeta/2A/mIL-15 chimeric antigen receptor complex (see FIG. 5, CAR5d). The polynucleotide comprises or is composed of a Tumor Binder, a CD8α hinge, a CD8α transmembrane domain, a 4-1BB domain, a CD3zeta domain, a 2A cleavage site, and an mIL-15 domain as described herein. In several embodiments, this receptor complex is encoded by a nucleic acid molecule comprising a sequence obtained from a combination of sequences disclosed herein, or comprises an amino acid sequence obtained from a combination of sequences disclosed herein. In several embodiments, the encoding nucleic acid sequence, or the amino acid sequence, comprises a sequence in accordance with one or more SEQ ID NOS as described herein, such as those included herein as examples of constituent parts. In several embodiments, the encoding nucleic acid sequence, or the amino acid sequence, comprises a sequence that shares at least about 90%, at least about 94%, at least about 95%, at least about 96%, at least about 97%, at least about 98%, or at least about 99%, sequence identity, homology and/or functional equivalence with a sequence resulting from the combination one or more SEQ ID NOS as described herein. It shall be appreciated that certain sequence variability, extensions, and/or truncations of the disclosed sequences may result when combining sequences, as a result of, for example, ease or efficiency in cloning (e.g., for creation of a restriction site).

[0508] In several embodiments, there is provided a polynucleotide encoding a Tumor Binder/CD8 alpha hinge/CD3 TM/4-1BB/NKp80 chimeric antigen receptor complex (see FIG. 5,CAR5e). The polynucleotide comprises or is composed of a Tumor Binder, a CD8α hinge, a CD3 transmembrane domain, a 4-1BB domain, and an NKp80 domain as described herein. In several embodiments, this receptor complex is encoded by a nucleic acid molecule comprising a sequence obtained from a combination of sequences disclosed herein, or comprises an amino acid sequence obtained from a combination of sequences disclosed herein. In several embodiments, the encoding nucleic acid sequence, or the amino acid sequence, comprises a sequence in accordance with one or more SEQ ID NOS as described herein, such as those included herein as examples of constituent parts. In several embodiments, the encoding nucleic acid sequence, or the amino acid sequence, comprises a sequence that shares at least about 90%, at least about 94%, at least about 95%, at least about 96%, at least about 97%, at least about 98%, or at least about 99%, sequence identity, homology and/or functional equivalence with a sequence resulting from the combination one or more SEQ ID NOS as described herein. It shall be appreciated that certain sequence variability, extensions, and/or truncations of the disclosed sequences may result when combining sequences, as a result of, for example, ease or efficiency in cloning (e.g., for creation of a restriction site).

[0509] In several embodiments, there is provided a polynucleotide encoding a Tumor Binder/CD8 alpha hinge/CD3 TM/4-1BB/NKp80/2A/mIL-15 chimeric antigen receptor complex (see FIG. 5, CAR5f). The polynucleotide comprises or is composed of a Tumor Binder, a CD8α hinge, a CD8α transmembrane domain, a 4-1BB domain, an NKp80 domain, a 2A cleavage site, and an mIL-15 domain as described herein. In several embodiments, this receptor complex is encoded by a nucleic acid molecule comprising a sequence obtained from a combination of sequences disclosed herein, or comprises an amino acid sequence obtained from a combination of sequences disclosed herein. In several embodiments, the encoding nucleic acid sequence, or the amino acid sequence, comprises a sequence in accordance with one or more SEQ ID NOS as described herein, such as those included herein as examples of constituent parts. In several embodiments, the encoding nucleic acid sequence, or the amino acid sequence, comprises a sequence that shares at least about 90%, at least about 94%, at least about 95%, at least about 96%, at least about 97%, at least about 98%, or at least about 99%, sequence identity, homology and/or functional equivalence with a sequence resulting from the combination one or more SEQ ID NOS as described herein. It shall be appreciated that certain sequence variability, extensions, and/or truncations of the disclosed sequences may result when combining sequences, as a result of, for example, ease or efficiency in cloning (e.g., for creation of a restriction site).

[0510] In several embodiments, there is provided a polynucleotide encoding a Tumor Binder/CD8 alpha hinge/CD3 TM/CD16 intracellular domain/4-1BB chimeric antigen receptor complex (see FIG. 5, CAR5g). The polynucleotide comprises or is composed of a Tumor Binder, a CD8α hinge, a CD3 transmembrane domain, CD16 intracellular domain, and a 4-1BB domain as described herein. In several embodiments, this receptor complex is encoded by a nucleic acid molecule comprising a sequence obtained from a combination of sequences disclosed herein, or comprises an amino acid sequence obtained from a combination of sequences disclosed herein. In several embodiments, the encoding nucleic acid sequence, or the amino acid sequence, comprises a sequence in accordance with one or more SEQ ID NOS as described herein, such as those included herein as examples of constituent parts. In several embodiments, the encoding nucleic acid sequence, or the amino acid sequence, comprises a sequence that shares at least about 90%, at least about 94%, at least about 95%, at least about 96%, at least about 97%, at least about 98%, or at least about 99%, sequence identity, homology and/or functional equivalence with a sequence resulting from the combination one or more SEQ ID NOS as described herein. It shall be appreciated that certain sequence variability, extensions, and/or truncations of the disclosed sequences may result when combining sequences, as a result of, for example, ease or efficiency in cloning (e.g., for creation of a restriction site).

[0511] In several embodiments, there is provided a polynucleotide encoding a Tumor Binder/CD8 alpha hinge/CD3 TM/CD16/4-1BB/2A/mIL-15 chimeric antigen receptor complex (see FIG. 5, CAR5h). The polynucleotide comprises or is composed of a Tumor Binder, a CD8α hinge, a CD8α transmembrane domain, a CD16 intracellular domain, a 4-1BB domain, a 2A cleavage site, and an mIL-15 domain as described herein. In several embodiments, this receptor complex is encoded by a nucleic acid molecule comprising a sequence obtained from a combination of sequences disclosed herein, or comprises an amino acid sequence obtained from a combination of sequences disclosed herein. In several embodiments, the encoding nucleic acid sequence, or the amino acid sequence, comprises a sequence in accordance with one or more SEQ ID NOS as described herein, such as those included herein as examples of constituent parts. In several embodiments, the encoding nucleic acid sequence, or the amino acid sequence, comprises a sequence that shares at least about 90%, at least about 94%, at least about 95%, at least about 96%, at least about 97%, at least about 98%, or at least about 99%, sequence identity, homology and/or functional equivalence with a sequence resulting from the combination one or more SEQ ID NOS as described herein. It shall be appreciated that certain sequence variability, extensions, and/or truncations of the disclosed sequences may result when combining sequences, as a result of, for example, ease or efficiency in cloning (e.g., for creation of a restriction site).

[0512] In several embodiments, there is provided a polynucleotide encoding a Tumor Binder/NKG2D Extracellular Domain/CD8hinge-CD8TM/OX40/CD3zeta chimeric antigen receptor complex (see FIG. 5, Bi-spec CAR/ACRa). The polynucleotide comprises or is composed of a Tumor Binder, an NKG2D extracellular domain (either full length or a fragment), a CD8α hinge, a CD8α transmembrane domain, an OX40 domain, and a CD3zeta domain as described herein. In several embodiments, this receptor complex is encoded by a nucleic acid molecule comprising a sequence obtained from a combination of sequences disclosed herein, or comprises an amino acid sequence obtained from a combination of sequences disclosed herein. In several embodiments, the encoding nucleic acid sequence, or the amino acid sequence, comprises a sequence in accordance with one or more SEQ ID NOS as described herein, such as those included herein as examples of constituent parts. In several embodiments, the encoding nucleic acid sequence, or the amino acid sequence, comprises a sequence that shares at least about 90%, at least about 94%, at least about 95%, at least about 96%, at least about 97%, at least about 98%, or at least about 99%, sequence identity, homology and/or functional equivalence with a sequence resulting from the combination one or more SEQ ID NOS as described herein. It shall be appreciated that certain sequence variability, extensions, and/or truncations of the disclosed sequences may result when combining sequences, as a result of, for example, ease or efficiency in cloning (e.g., for creation of a restriction site).

[0513] In several embodiments, there is provided a polynucleotide encoding a Tumor Binder/NKG2D EC Domain/CD8hinge-CD8TM/OX40/CD3zeta/2A/mIL-15 chimeric antigen receptor complex (see FIG. 5, Bi-spec CAR/ACRb). The polynucleotide comprises or is composed of a Tumor Binder, an NKG2D extracellular domain (either full length or a fragment), a CD8α hinge, a CD8αtransmembrane domain, an OX40 domain, a CD3zeta domain, a 2A cleavage site, and an mIL-15 domain as described herein. In several embodiments, this receptor complex is encoded by a nucleic acid molecule comprising a sequence obtained from a combination of sequences disclosed herein, or comprises an amino acid sequence obtained from a combination of sequences disclosed herein. In several embodiments, the encoding nucleic acid sequence, or the amino acid sequence, comprises a sequence in accordance with one or more SEQ ID NOS as described herein, such as those included herein as examples of constituent parts. In several embodiments, the encoding nucleic acid sequence, or the amino acid sequence, comprises a sequence that shares at least about 90%, at least about 94%, at least about 95%, at least about 96%, at least about 97%, at least about 98%, or at least about 99%, sequence identity, homology and/or functional equivalence with a sequence resulting from the combination one or more SEQ ID NOS as described herein. It shall be appreciated that certain sequence variability, extensions, and/or truncations of the disclosed sequences may result when combining sequences, as a result of, for example, ease or efficiency in cloning (e.g., for creation of a restriction site).

[0514] In several embodiments, there is provided a polynucleotide encoding a Tumor Binder/CD8hinge/CD8TM/4-1 BB/CD3zeta chimeric antigen receptor complex (see FIG. 1, CAR1a). The polynucleotide comprises or is composed of a Tumor Binder, a CD8α hinge, a CD8α transmembrane domain, a 4-1 BB domain, and a CD3zeta domain. By way of non-limiting embodiment, there is provided herein an anti-CD19/CD8hinge/CD8TM/4-1BB/CD3zeta chimeric antigen receptor complex. In several embodiments, this receptor complex is encoded by a nucleic acid molecule having the sequence of SEQ ID NO: 85. In several embodiments, a nucleic acid sequence encoding an CAR1a chimeric antigen receptor comprises a sequence that shares at least about 90%, at least about 94%, at least about 95%, at least about 96%, at least about 97%, at least about 98%, or at least about 99%, sequence identity, homology and/or functional equivalence with SEQ ID NO: 85. In several embodiments, the chimeric receptor comprises the amino acid sequence of SEQ ID NO: 86. In several embodiments, a CAR1a chimeric antigen receptor comprises an amino acid sequence that shares at least about 90%, at least about 94%, at least about 95%, at least about 96%, at least about 97%, at least about 98%, or at least about 99%, sequence identity, homology and/or functional equivalence with SEQ ID NO: 86. It shall be appreciated that certain sequence variability, extensions, and/or truncations of the disclosed sequences may result when combining sequences, as a result of, for example, ease or efficiency in cloning (e.g., for creation of a restriction site). In several embodiments, there is provided an CAR1a construct that further comprises mbIL15, as disclosed herein (see e.g., FIG. 1 CAR1 b).

[0515] In several embodiments, there is provided a polynucleotide encoding a Tumor Binder/CD8hinge/CD8TM/OX40/CD3zeta chimeric antigen receptor complex (see FIG. 1, CAR1c). The polynucleotide comprises or is composed of a Tumor Binder, a CD8α hinge, a CD8α transmembrane domain, an OX40 domain, and a CD3zeta domain. In several embodiments, the chimeric antigen receptor further comprises mbIL15 (see FIG. 1, CAR1d). By way of non-limiting embodiment, there is provided herein an anti CD19/CD8hinge/CD8TM/OX40/CD3zeta/2A/mIL-15 chimeric antigen receptor. In such embodiments, the polynucleotide comprises or is composed of an anti-CD19 scFv, a CD8α hinge, a CD8αtransmembrane domain, an OX40 domain, a CD3zeta domain, a 2A cleavage site, and an mblL-15 domain as described herein. In several embodiments, this receptor complex is encoded by a nucleic acid molecule having the sequence of SEQ ID NO: 59. In several embodiments, a nucleic acid sequence encoding an CAR1d chimeric antigen receptor comprises a sequence that shares at least about 90%, at least about 94%, at least about 95%, at least about 96%, at least about 97%, at least about 98%, or at least about 99%, sequence identity, homology and/or functional equivalence with SEQ ID NO: 59. In several embodiments, the chimeric receptor comprises the amino acid sequence of SEQ ID NO: 60. In several embodiments, a NK19 chimeric antigen receptor comprises an amino acid sequence that shares at least about 90%, at least about 94%, at least about 95%, at least about 96%, at least about 97%, at least about 98%, or at least about 99%, sequence identity, homology and/or functional equivalence with SEQ ID NO: 60. In several embodiments, the CD19 scFv does not comprise a Flag tag. It shall be appreciated that certain sequence variability, extensions, and/or truncations of the disclosed sequences may result when combining sequences, as a result of, for example, ease or efficiency in cloning (e.g., for creation of a restriction site).

[0516] In several embodiments, there is provided a polynucleotide encoding a Tumor Binder/CD8hinge/CD28TM/CD28/CD3zeta chimeric antigen receptor complex (see FIG. 1, CAR1e). The polynucleotide comprises or is composed of a Tumor Binder, a CD8α hinge, a CD28 transmembrane domain, CD28 signaling domain, and a CD3zeta domain. In several embodiments, the chimeric antigen receptor further comprises mbIL15 (see FIG. 1, CAR1d). By way of non-limiting embodiment, there is provided herein an anti-CD19moiety/CD8hinge/CD28TM/CD28/CD3zeta/2A/mIL15 chimeric antigen receptor complex. In such embodiments, the polynucleotide comprises or is composed of an anti-CD19 scFv, a CD8α hinge, a CD28 transmembrane domain, CD28 signaling domain, a CD3zeta domain a 2A cleavage site, and an mblL-15 domain as described herein. In several embodiments, this receptor complex is encoded by a nucleic acid molecule having the sequence of SEQ ID NO: 61. In several embodiments, a nucleic acid sequence encoding an CAR1d chimeric antigen receptor comprises a sequence that shares at least about 90%, at least about 94%, at least about 95%, at least about 96%, at least about 97%, at least about 98%, or at least about 99%, sequence identity, homology and/or functional equivalence with SEQ ID NO: 61. In several embodiments, the chimeric receptor comprises the amino acid sequence of SEQ ID NO: 62. In several embodiments, a CAR1d chimeric antigen receptor comprises an amino acid sequence that shares at least about 90%, at least about 94%, at least about 95%, at least about 96%, at least about 97%, at least about 98%, or at least about 99%, sequence identity, homology and/or functional equivalence with SEQ ID NO: 62. In several embodiments, the CD19 scFv does not comprise a Flag tag. It shall be appreciated that certain sequence variability, extensions, and/or truncations of the disclosed sequences may result when combining sequences, as a result of, for example, ease or efficiency in cloning (e.g., for creation of a restriction site).

[0517] In several embodiments, there is provided a polynucleotide encoding a Tumor Binder/CD8hinge/CD8aTM/ICOS/CD3zeta chimeric antigen receptor complex (see FIG. 1, CAR1g). The polynucleotide comprises or is composed of a Tumor Binder, a CD8α hinge, a CD8α transmembrane domain, inducible costimulator (ICOS) signaling domain, and a CD3zeta domain. In several embodiments, the chimeric antigen receptor further comprises mbIL15 (see 1, CAR1 h). By way of non-limiting embodiment, there is provided herein an anti-CD19moiety/CD8hinge/CD8aTM/ICOS/CD3zeta/2A/mIL15 chimeric antigen receptor complex. In such embodiments, the polynucleotide comprises or is composed of an anti-CD19 scFv, a CD8α hinge, a CD8α transmembrane domain, inducible costimulator (ICOS) signaling domain, a CD3zeta domain, a 2A cleavage site, and an mblL-15 domain as described herein. In several embodiments, this receptor complex is encoded by a nucleic acid molecule having the sequence of SEQ ID NO: 63. In several embodiments, a nucleic acid sequence encoding an CAR1 h chimeric antigen receptor comprises a sequence that shares at least about 90%, at least about 94%, at least about 95%, at least about 96%, at least about 97%, at least about 98%, or at least about 99%, sequence identity, homology and/or functional equivalence with SEQ ID NO: 63. In several embodiments, the chimeric receptor comprises the amino acid sequence of SEQ ID NO: 64. In several embodiments, a CAR1 h chimeric antigen receptor comprises an amino acid sequence that shares at least about 90%, at least about 94%, at least about 95%, at least about 96%, at least about 97%, at least about 98%, or at least about 99%, sequence identity, homology and/or functional equivalence with SEQ ID NO: 64. In several embodiments, the CAR1 h scFv does not comprise a Flag tag. It shall be appreciated that certain sequence variability, extensions, and/or truncations of the disclosed sequences may result when combining sequences, as a result of, for example, ease or efficiency in cloning (e.g., for creation of a restriction site).

[0518] In several embodiments, there is provided a polynucleotide encoding a Tumor Binder/CD8hinge/CD8aTM/CD28/4-1 BB/CD3zeta chimeric antigen receptor complex (see FIG. 1, CAR1 i). The polynucleotide comprises or is composed of a Tumor Binder, a CD8α hinge, a CD8α transmembrane domain, a CD28 signaling domain, a 4-1BB signaling domain, and a CD3zeta domain. In several embodiments, the chimeric antigen receptor further comprises mbIL15 (see FIG. 3A, NK19-4b). By way of non-limiting embodiment, there is provided herein an anti-CD19moiety/CD8hinge/CD8aTM/CD28/4-1 BB/CD3zeta/2A/mIL-15. In such embodiments, the polynucleotide comprises or is composed of an anti-CD19 scFv, a CD8α hinge, a CD8α transmembrane domain, a CD28 signaling domain, a 4-1 BB signaling domain, a CD3zeta domain, a 2A cleavage site, and an mblL-15 domain as described herein. In several embodiments, this receptor complex is encoded by a nucleic acid molecule having the sequence of SEQ ID NO: 65. In several embodiments, a nucleic acid sequence encoding an CAR1 h chimeric antigen receptor comprises a sequence that shares at least about 90%, at least about 94%, at least about 95%, at least about 96%, at least about 97%, at least about 98%, or at least about 99%, sequence identity, homology and/or functional equivalence with SEQ ID NO: 65. In several embodiments, the chimeric receptor comprises the amino acid sequence of SEQ ID NO: 66. In several embodiments, a CAR1 h chimeric antigen receptor comprises an amino acid sequence that shares at least about 90%, at least about 94%, at least about 95%, at least about 96%, at least about 97%, at least about 98%, or at least about 99%, sequence identity, homology and/or functional equivalence with SEQ ID NO: 66. In several embodiments, the CAR1 h scFv does not comprise a Flag tag. It shall be appreciated that certain sequence variability, extensions, and/or truncations of the disclosed sequences may result when combining sequences, as a result of, for example, ease or efficiency in cloning (e.g., for creation of a restriction site).

[0519] In several embodiments, there is provided a polynucleotide encoding a Tumor Binder/CD8hinge/NKG2DTM/OX40/CD3zeta chimeric antigen receptor complex (see FIG. 2, CAR2a). The polynucleotide comprises or is composed of a Tumor Binder, a CD8α hinge, a NKG2D transmembrane domain, an OX40 signaling domain, and a CD3zeta domain. In several embodiments, the chimeric antigen receptor further comprises mbIL15 (see FIG. 2, CAR2b). By way of non-limiting embodiment, there is provided herein an anti-CD19moiety/CD8hinge/NKG2DTM/OX40/CD3zeta/2A/mIL-15 chimeric antigen receptor complex. In such embodiments, the polynucleotide comprises or is composed of an anti-CD19 scFv, a CD8α hinge, a NKG2D transmembrane domain, an OX40 signaling domain, a CD3zeta domain, a 2A cleavage site, and an mblL-15 domain as described herein. In several embodiments, this receptor complex is encoded by a nucleic acid molecule having the sequence of SEQ ID NO: 67. In several embodiments, a nucleic acid sequence encoding an CAR2b chimeric antigen receptor comprises a sequence that shares at least about 90%, at least about 94%, at least about 95%, at least about 96%, at least about 97%, at least about 98%, or at least about 99%, sequence identity, homology and/or functional equivalence with SEQ ID NO: 67. In several embodiments, the chimeric receptor comprises the amino acid sequence of SEQ ID NO: 68. In several embodiments, a CAR2b chimeric antigen receptor comprises an amino acid sequence that shares at least about 90%, at least about 94%, at least about 95%, at least about 96%, at least about 97%, at least about 98%, or at least about 99%, sequence identity, homology and/or functional equivalence with SEQ ID NO: 68. In several embodiments, the CD19 scFv does not comprise a Flag tag. It shall be appreciated that certain sequence variability, extensions, and/or truncations of the disclosed sequences may result when combining sequences, as a result of, for example, ease or efficiency in cloning (e.g., for creation of a restriction site).

[0520] In several embodiments, there is provided a polynucleotide encoding a Tumor Binder/CD8hinge/CD8aTM/CD40/CD3zeta chimeric antigen receptor complex (see Figure CAR2c). The polynucleotide comprises or is composed of Tumor Binder, a CD8α hinge, a CD8α transmembrane domain, a CD40 signaling domain, and a CD3zeta domain. In several embodiments, the chimeric antigen receptor further comprises mbIL15 (see FIG. 1, CAR2d). By way of non-limiting embodiment, there is provided herein an anti-CD19moiety/CD8hinge/CD8aTM/CD40/CD3zeta/2A/mIL-15 chimeric antigen receptor complex. In such embodiments, the polynucleotide comprises or is composed of an anti-CD19 scFv variable heavy chain, a CD8α hinge, a CD8α transmembrane domain, a CD40 signaling domain, a CD3zeta domain, a 2A cleavage site, and an mblL-15 domain as described herein. In several embodiments, this receptor complex is encoded by a nucleic acid molecule having the sequence of SEQ ID NO: 69. In several embodiments, a nucleic acid sequence encoding an CAR2d chimeric antigen receptor comprises a sequence that shares at least about 90%, at least about 94%, at least about 95%, at least about 96%, at least about 97%, at least about 98%, or at least about 99%, sequence identity, homology and/or functional equivalence with SEQ ID NO: 69. In several embodiments, the chimeric receptor comprises the amino acid sequence of SEQ ID NO: 70. In several embodiments, a CAR2d chimeric antigen receptor comprises an amino acid sequence that shares at least about 90%, at least about 94%, at least about 95%, at least about 96%, at least about 97%, at least about 98%, or at least about 99%, sequence identity, homology and/or functional equivalence with SEQ ID NO: 70. In several embodiments, the CD19 scFv does not comprise a Flag tag. It shall be appreciated that certain sequence variability, extensions, and/or truncations of the disclosed sequences may result when combining sequences, as a result of, for example, ease or efficiency in cloning (e.g., for creation of a restriction site).

[0521] In several embodiments, there is provided a polynucleotide encoding a Tumor Binder/CD8hinge/CD8aTM/OX40/CD3zeta/2A/EGFRt chimeric antigen receptor complex (see FIG. 2, CAR2e). The polynucleotide comprises or is composed of a Tumor Binder, a CD8α hinge, a CD8α transmembrane domain, an OX40 signaling domain, a CD3zeta domain, a 2A cleavage side, and a truncated version of the epidermal growth factor receptor (EGFRt). In several embodiments, the chimeric antigen receptor further comprises mbIL15 (see FIG. 2, CAR2f). By way of non-limiting embodiment, there is provided herein an anti-CD19moiety/CD8hinge/CD8aTM/OX40/CD3zeta/2A/mIL-15/2A/EGFRt chimeric antigen receptor complex. In such embodiments, the polynucleotide comprises or is composed of an anti-CD19 scFv, a CD8α hinge, a CD8α transmembrane domain, an OX40 signaling domain, a CD3zeta domain, a 2A cleavage side, a truncated version of the epidermal growth factor receptor (EGFRt), an additional 2A cleavage site, and an mblL-15 domain as described herein. In several embodiments, this receptor complex is encoded by a nucleic acid molecule having the sequence of SEQ ID NO: 71. In several embodiments, a nucleic acid sequence encoding an CAR2f chimeric antigen receptor comprises a sequence that shares at least about 90%, at least about 94%, at least about 95%, at least about 96%, at least about 97%, at least about 98%, or at least about 99%, sequence identity, homology and/or functional equivalence with SEQ ID NO: 71. In several embodiments, the chimeric receptor comprises the amino acid sequence of SEQ ID NO: 72. In several embodiments, a CAR2f chimeric antigen receptor comprises an amino acid sequence that shares at least about 90%, at least about 94%, at least about 95%, at least about 96%, at least about 97%, at least about 98%, or at least about 99%, sequence identity, homology and/or functional equivalence with SEQ ID NO: 72. In several embodiments, the CD19 scFv does not comprise a Flag tag. It shall be appreciated that certain sequence variability, extensions, and/or truncations of the disclosed sequences may result when combining sequences, as a result of, for example, ease or efficiency in cloning (e.g., for creation of a restriction site).

[0522] In several embodiments, there is provided a polynucleotide encoding a Tumor Binder/CD8hinge/CD8aTM/CD40/CD3zeta chimeric antigen receptor complex (see FIG. 2, CAR2g). The polynucleotide comprises or is composed of a Tumor Binder, a CD8α hinge, a CD8α transmembrane domain, a CD40 signaling domain, and a CD3zeta domain. In several embodiments, the chimeric antigen receptor further comprises mbIL15 (see FIG. 2, CAR2h). By way of non-limiting embodiment, there is provided herein an anti-CD19moiety/CD8hinge/CD8aTM/CD40/CD3zeta/2A/mIL-15 chimeric antigen receptor complex. In such embodiments, the polynucleotide comprises or is composed of an anti-CD19 scFv variable light chain, a CD8α hinge, a CD8α transmembrane domain, a CD40 signaling domain, a CD3zeta domain, a 2A cleavage site, and an mblL-15 domain as described herein. In several embodiments, this receptor complex is encoded by a nucleic acid molecule having the sequence of SEQ ID NO: 73. In several embodiments, a nucleic acid sequence encoding an CAR2h chimeric antigen receptor comprises a sequence that shares at least about 90%, at least about 94%, at least about 95%, at least about 96%, at least about 97%, at least about 98%, or at least about 99%, sequence identity, homology and/or functional equivalence with SEQ ID NO: 73. In several embodiments, the chimeric receptor comprises the amino acid sequence of SEQ ID NO: 74. In several embodiments, a CAR2h chimeric antigen receptor comprises an amino acid sequence that shares at least about 90%, at least about 94%, at least about 95%, at least about 96%, at least about 97%, at least about 98%, or at least about 99%, sequence identity, homology and/or functional equivalence with SEQ ID NO: 74. In several embodiments, the CD19 scFv does not comprise a Flag tag. It shall be appreciated that certain sequence variability, extensions, and/or truncations of the disclosed sequences may result when combining sequences, as a result of, for example, ease or efficiency in cloning (e.g., for creation of a restriction site).

[0523] In several embodiments, there is provided a polynucleotide encoding a Tumor Binder/CD8hinge/CD8aTM/CD27/CD3zeta chimeric antigen receptor complex (see FIG. 3, CAR3a). The polynucleotide comprises or is composed of a Tumor Binder, a CD8α hinge, a CD8α transmembrane domain, a CD27 signaling domain, and a CD3zeta domain. In several embodiments, the chimeric antigen receptor further comprises mbIL15 (see FIG. 3, CAR3b). By way of non-limiting embodiment, there is provided herein an anti-CD19moiety/CD8hinge/CD8aTM/CD27/CD3zeta/2A/mIL-15 chimeric antigen receptor complex. In such embodiments, the polynucleotide comprises or is composed of an anti-CD19 scFv, a CD8α hinge, a CD8α transmembrane domain, a CD27 signaling domain, a CD3zeta domain, a 2A cleavage site, and an mblL-15 domain as described herein. In several embodiments, this receptor complex is encoded by a nucleic acid molecule having the sequence of SEQ ID NO: 75. In several embodiments, a nucleic acid sequence encoding an CAR3b chimeric antigen receptor comprises a sequence that shares at least about 90%, at least about 94%, at least about 95%, at least about 96%, at least about 97%, at least about 98%, or at least about 99%, sequence identity, homology and/or functional equivalence with SEQ ID NO: 75. In several embodiments, the chimeric receptor comprises the amino acid sequence of SEQ ID NO: 76. In several embodiments, a CAR3b chimeric antigen receptor comprises an amino acid sequence that shares at least about 90%, at least about 94%, at least about 95%, at least about 96%, at least about 97%, at least about 98%, or at least about 99%, sequence identity, homology and/or functional equivalence with SEQ ID NO: 76. In several embodiments, the CD19 scFv does not comprise a Flag tag. It shall be appreciated that certain sequence variability, extensions, and/or truncations of the disclosed sequences may result when combining sequences, as a result of, for example, ease or efficiency in cloning (e.g., for creation of a restriction site).

[0524] In several embodiments, there is provided a polynucleotide encoding a Tumor Binder/CD8hinge/CD8aTM/CD70/CD3zeta chimeric antigen receptor complex (see FIG. 3, CAR3c). The polynucleotide comprises or is composed of a Tumor Binder, a CD8α hinge, a CD8α transmembrane domain, a CD70 signaling domain, and a CD3zeta domain. In several embodiments, the chimeric antigen receptor further comprises mbIL15 (see FIG. 3, CAR3d). By way of non-limiting embodiment, there is provided herein an anti-CD19moiety/CD8hinge/CD8aTM/CD70/CD3zeta/2A/mIL-15 chimeric antigen receptor complex. In such embodiments, the polynucleotide comprises or is composed of an anti-CD19 scFv, a CD8α hinge, a CD8α transmembrane domain, a CD70 signaling domain, a CD3zeta domain, a 2A cleavage site, and an mblL-15 domain as described herein. In several embodiments, this receptor complex is encoded by a nucleic acid molecule having the sequence of SEQ ID NO: 77. In several embodiments, a nucleic acid sequence encoding an CAR3d chimeric antigen receptor comprises a sequence that shares at least about 90%, at least about 94%, at least about 95%, at least about 96%, at least about 97%, at least about 98%, or at least about 99%, sequence identity, homology and/or functional equivalence with SEQ ID NO: 77. In several embodiments, the chimeric receptor comprises the amino acid sequence of SEQ ID NO: 78. In several embodiments, a CAR3d chimeric antigen receptor comprises an amino acid sequence that shares at least about 90%, at least about 94%, at least about 95%, at least about 96%, at least about 97%, at least about 98%, or at least about 99%, sequence identity, homology and/or functional equivalence with SEQ ID NO: 78. In several embodiments, the CD19 scFv does not comprise a Flag tag. It shall be appreciated that certain sequence variability, extensions, and/or truncations of the disclosed sequences may result when combining sequences, as a result of, for example, ease or efficiency in cloning (e.g., for creation of a restriction site).

[0525] In several embodiments, there is provided a polynucleotide encoding a Tumor Binder/CD8hinge/CD8aTM/CD161/CD3zeta chimeric antigen receptor complex (see FIG. 3, CAR3e). The polynucleotide comprises or is composed of a Tumor Binder, a CD8α hinge, a CD8α transmembrane domain, a CD161 signaling domain, and a CD3zeta domain. In several embodiments, the chimeric antigen receptor further comprises mbIL15 (see FIG. 3, CAR3f). By way of non-limiting embodiment, there is provided herein an anti-CD19moiety/CD8hinge/CD8aTM/CD161/CD3zeta/2A/mIL-15 chimeric antigen receptor complex. In such embodiments, the polynucleotide comprises or is composed of an anti-CD19 scFv, a CD8α hinge, a CD8α transmembrane domain, a CD161 signaling domain, a CD3zeta domain, a 2A cleavage site, and an mblL-15 domain as described herein. In several embodiments, this receptor complex is encoded by a nucleic acid molecule having the sequence of SEQ ID NO: 79. In several embodiments, a nucleic acid sequence encoding an CAR3f chimeric antigen receptor comprises a sequence that shares at least about 90%, at least about 94%, at least about 95%, at least about 96%, at least about 97%, at least about 98%, or at least about 99%, sequence identity, homology and/or functional equivalence with SEQ ID NO: 79. In several embodiments, the chimeric receptor comprises the amino acid sequence of SEQ ID NO: 80. In several embodiments, a CAR3f chimeric antigen receptor comprises an amino acid sequence that shares at least about 90%, at least about 94%, at least about 95%, at least about 96%, at least about 97%, at least about 98%, or at least about 99%, sequence identity, homology and/or functional equivalence with SEQ ID NO: 80. In several embodiments, the CD19 scFv does not comprise a Flag tag. It shall be appreciated that certain sequence variability, extensions, and/or truncations of the disclosed sequences may result when combining sequences, as a result of, for example, ease or efficiency in cloning (e.g., for creation of a restriction site).

[0526] In several embodiments, there is provided a polynucleotide encoding a Tumor Binder/CD8hinge/CD8aTM/CD40L/CD3zeta chimeric antigen receptor complex (see FIG. 3, CAR3g). The polynucleotide comprises or is composed of a Tumor Binder, a CD8α hinge, a CD8α transmembrane domain, a CD40L signaling domain, and a CD3zeta domain. In several embodiments, the chimeric antigen receptor further comprises mbIL15 (see FIG. 3, CAR3h). By way of non-limiting embodiment, there is provided herein an anti-CD19moiety/CD8hinge/CD8aTM/CD40L/CD3zeta/2A/mIL-15 chimeric antigen receptor complex. In such embodiments, the polynucleotide comprises or is composed of an anti-CD19 scFv, a CD8α hinge, a CD8α transmembrane domain, a CD40L signaling domain, a CD3zeta domain, a 2A cleavage site, and an mblL-15 domain as described herein. In several embodiments, this receptor complex is encoded by a nucleic acid molecule having the sequence of SEQ ID NO: 81. In several embodiments, a nucleic acid sequence encoding an CAR3h chimeric antigen receptor comprises a sequence that shares at least about 90%, at least about 94%, at least about 95%, at least about 96%, at least about 97%, at least about 98%, or at least about 99%, sequence identity, homology and/or functional equivalence with SEQ ID NO: 81. In several embodiments, the chimeric receptor comprises the amino acid sequence of SEQ ID NO: 82. In several embodiments, a CAR3h chimeric antigen receptor comprises an amino acid sequence that shares at least about 90%, at least about 94%, at least about 95%, at least about 96%, at least about 97%, at least about 98%, or at least about 99%, sequence identity, homology and/or functional equivalence with SEQ ID NO: 82. In several embodiments, the CD19 scFv does not comprise a Flag tag. It shall be appreciated that certain sequence variability, extensions, and/or truncations of the disclosed sequences may result when combining sequences, as a result of, for example, ease or efficiency in cloning (e.g., for creation of a restriction site).

[0527] In several embodiments, there is provided a polynucleotide encoding a Tumor Binder/CD8hinge/CD8aTM/CD44/CD3zeta chimeric antigen receptor complex (see FIG. 3, CAR3i). The polynucleotide comprises or is composed of a Tumor Binder, a CD8α hinge, a CD8α transmembrane domain, a CD44 signaling domain, and a CD3zeta domain. In several embodiments, the chimeric antigen receptor further comprises mbIL15 (see FIG. 3, CAR3j). By way of non-limiting embodiment, there is provided herein an anti-CD19moiety/CD8hinge/CD8aTM/CD44/CD3zeta/2A/mIL-15 chimeric antigen receptor complex. In such embodiments, the polynucleotide comprises or is composed of an anti-CD19 scFv, a CD8α hinge, a CD8α transmembrane domain, a CD44 signaling domain, a CD3zeta domain, a 2A cleavage site, and an mblL-15 domain as described herein. In several embodiments, this receptor complex is encoded by a nucleic acid molecule having the sequence of SEQ ID NO: 83. In several embodiments, a nucleic acid sequence encoding an CAR3j chimeric antigen receptor comprises a sequence that shares at least about 90%, at least about 94%, at least about 95%, at least about 96%, at least about 97%, at least about 98%, or at least about 99%, sequence identity, homology and/or functional equivalence with SEQ ID NO: 83. In several embodiments, the chimeric receptor comprises the amino acid sequence of SEQ ID NO: 84. In several embodiments, a CAR3j chimeric antigen receptor comprises an amino acid sequence that shares at least about 90%, at least about 94%, at least about 95%, at least about 96%, at least about 97%, at least about 98%, or at least about 99%, sequence identity, homology and/or functional equivalence with SEQ ID NO: 84. In several embodiments, the CD19 scFv does not comprise a Flag tag. It shall be appreciated that certain sequence variability, extensions, and/or truncations of the disclosed sequences may result when combining sequences, as a result of, for example, ease or efficiency in cloning (e.g., for creation of a restriction site).

[0528] In several embodiments, there is provided a polynucleotide encoding an anti CD123/CD8αhinge/CD8α transmembrane domain/OX40/CD3zeta chimeric antigen receptor complex (see FIG. 6, CD123 CARa). The polynucleotide comprises or is composed of an anti CD123 moiety, a CD8alpha hinge, a CD8α transmembrane domain, an OX40 domain, and a CD3zeta domain as described herein. In several embodiments, this receptor complex is encoded by a nucleic acid molecule comprising a sequence obtained from a combination of sequences disclosed herein, or comprises an amino acid sequence obtained from a combination of sequences disclosed herein. In several embodiments, the encoding nucleic acid sequence, or the amino acid sequence, comprises a sequence in accordance with one or more SEQ ID NOS as described herein, such as those included herein as examples of constituent parts. In several embodiments, the encoding nucleic acid sequence, or the amino acid sequence, comprises a sequence that shares at least about 90%, at least about 94%, at least about 95%, at least about 96%, at least about 97%, at least about 98%, or at least about 99%, sequence identity, homology and/or functional equivalence with a sequence resulting from the combination one or more SEQ ID NOS as described herein. It shall be appreciated that certain sequence variability, extensions, and/or truncations of the disclosed sequences may result when combining sequences, as a result of, for example, ease or efficiency in cloning (e.g., for creation of a restriction site). In several embodiments, there is provided an CD123 CAR construct that further comprises mbIL15, as disclosed herein (see e.g., FIG. 6, CD123 CARb).

[0529] In several embodiments, there is provided a polynucleotide encoding an anti CLDN6/CD8αhinge/CD8α transmembrane domain/OX40/CD3zeta chimeric antigen receptor complex (see FIG. 6, CLDN6 CARa). The polynucleotide comprises or is composed of an anti CLDN6 binding moiety, a CD8alpha hinge, a CD8α transmembrane domain, an OX40 domain, and a CD3zeta domain as described herein. In several embodiments, this receptor complex is encoded by a nucleic acid molecule comprising a sequence obtained from a combination of sequences disclosed herein, or comprises an amino acid sequence obtained from a combination of sequences disclosed herein. In several embodiments, the encoding nucleic acid sequence, or the amino acid sequence, comprises a sequence in accordance with one or more SEQ ID NOS as described herein, such as those included herein as examples of constituent parts. In several embodiments, the encoding nucleic acid sequence, or the amino acid sequence, comprises a sequence that shares at least about 90%, at least about 94%, at least about 95%, at least about 96%, at least about 97%, at least about 98%, or at least about 99%, sequence identity, homology and/or functional equivalence with a sequence resulting from the combination one or more SEQ ID NOS as described herein. It shall be appreciated that certain sequence variability, extensions, and/or truncations of the disclosed sequences may result when combining sequences, as a result of, for example, ease or efficiency in cloning (e.g., for creation of a restriction site). In several embodiments, there is provided a CLDN6 CAR construct that further comprises mbIL15, as disclosed herein (see e.g., FIG. 6, CLDN6 CARb).

[0530] Depending on the embodiment, various binders can be used to target CLDN6. In several embodiments, peptide binders are used, while in some embodiments antibodies, or fragments thereof are used. In several embodiments employing antibodies, antibody sequences are optimized, humanized or otherwise manipulated or mutated from their native form in order to increase one or more of stability, affinity, avidity or other characteristic of the antibody or fragment. In several embodiments, an antibody is provided that is specific for CLDN6. In several embodiments, an scFv is provided that is specific for CLDN6. In several embodiments, the antibody or scFv specific for CLDN6 comprises a heavy chain variable comprising the amino acid sequence of SEQ ID NO. 88. In some embodiments, the heavy chain variable comprises a sequence of amino acids that is at least 70%, 75%, 80%, 85%, 90%, 91%, 92%, 93%, 94%, 95%, 96%, 97%, 98%, 99%, or more, identical to the sequence of SEQ ID NO. 88. In some embodiments, the heavy chain variable comprises a sequence of amino acids that is encoded by a polynucleotide that hybridizes under moderately stringent conditions to the complement of a polynucleotide that encodes a heavy chain variable of SEQ ID NO. 88. In some embodiments, the heavy chain variable domain a sequence of amino acids that is encoded by a polynucleotide that hybridizes under stringent conditions to the complement of a polynucleotide that encodes a heavy chain variable encodes a heavy chain variable of SEQ ID NO. 88.

[0531] In several embodiments, the antibody or scFv specific for CLDN6 comprises a light chain variable comprising the amino acid sequence of any of SEQ ID NO. 89, 90, or 91. In several embodiments, the light chain variable comprises a sequence of amino acids that is encoded by a nucleotide sequence that is at least 70%, 75%, 80%, 85%, 90%, 91%, 92%, 93%, 94%, 95%, 96%, 97%, 98%, 99%, or more, identical to the identical to the sequence of SEQ ID NO. 89, 90, or 91. In some embodiments, the light chain variable comprises a sequence of amino acids that is encoded by a polynucleotide that hybridizes under moderately stringent conditions to the complement of a polynucleotide that encodes a light chain variable of SEQ ID NO. 89, 90, or 91. In some embodiments, the light chain variable domain comprises a sequence of amino acids that is encoded by a polynucleotide that hybridizes under stringent conditions to the complement of a polynucleotide that encodes a light chain variable domain of SEQ ID NO. 89, 90, or 91.

[0532] In several embodiments, the anti-CLDN6 antibody or scFv comprises one, two, or three heavy chain complementarity determining region (CDR) and one, two, or three light chain CDRs. In several embodiments, a first heavy chain CDR has the amino acid sequence of SEQ ID NO: 92. In some embodiments, the first heavy chain CDR comprises a sequence of amino acids that is at least 70%, 75%, 80%, 85%, 90%, 91%, 92%, 93%, 94%, 95%, 96%, 97%, 98%, 99%, or more, identical to the sequence of SEQ ID NO. 92. In several embodiments, a second heavy chain CDR has the amino acid sequence of SEQ ID NO: 93. In some embodiments, the second heavy chain CDR comprises a sequence of amino acids that is at least 70%, 75%, 80%, 85%, 90%, 91%, 92%, 93%, 94%, 95%, 96%, 97%, 98%, 99%, or more, identical to the sequence of SEQ ID NO. 93. In several embodiments, a third heavy chain CDR has the amino acid sequence of SEQ ID NO: 94. In some embodiments, the third heavy chain CDR comprises a sequence of amino acids that is at least 70%, 75%, 80%, 85%, 90%, 91%, 92%, 93%, 94%, 95%, 96%, 97%, 98%, 99%, or more, identical to the sequence of SEQ ID NO. 94.

[0533] In several embodiments, a first light chain CDR has the amino acid sequence of SEQ ID NO: 95, 98, or 101. In some embodiments, the first light chain CDR comprises a sequence of amino acids that is at least 70%, 75%, 80%, 85%, 90%, 91%, 92%, 93%, 94%, 95%, 96%, 97%, 98%, 99%, or more, identical to the sequence of SEQ ID NO. 95, 98, or 101. In several embodiments, a second light chain CDR has the amino acid sequence of SEQ ID NO: 96, 99, or 102. In some embodiments, the second light chain CDR comprises a sequence of amino acids that is at least 70%, 75%, 80%, 85%, 90%, 91%, 92%, 93%, 94%, 95%, 96%, 97%, 98%, 99%, or more, identical to the sequence of SEQ ID NO. 96, 99, or 102. In several embodiments, a third light chain CDR has the amino acid sequence of SEQ ID NO: 97, 100, or 103. In some embodiments, the third light chain CDR comprises a sequence of amino acids that is at least 70%, 75%, 80%, 85%, 90%, 91%, 92%, 93%, 94%, 95%, 96%, 97%, 98%, 99%, or more, identical to the sequence of SEQ ID NO. 97, 100, or 103.

[0534] Advantageously, in several embodiments, the CLDN6 CARs are highly specific to CLDN6 and do not substantially bind to any of CLDN3, 4, or 9.

[0535] In several embodiments, there is provided a polynucleotide encoding an anti BCMA/CD8αhinge/CD8α transmembrane domain/OX40/CD3zeta chimeric antigen receptor complex (see FIG. 6, BCMA CARa). The polynucleotide comprises or is composed of an anti BCMA binding moiety, a CD8alpha hinge, a CD8α transmembrane domain, an OX40 domain, and a CD3zeta domain as described herein. In several embodiments, this receptor complex is encoded by a nucleic acid molecule comprising a sequence obtained from a combination of sequences disclosed herein, or comprises an amino acid sequence obtained from a combination of sequences disclosed herein. In several embodiments, the encoding nucleic acid sequence, or the amino acid sequence, comprises a sequence in accordance with one or more SEQ ID NOS as described herein, such as those included herein as examples of constituent parts. In several embodiments, the encoding nucleic acid sequence, or the amino acid sequence, comprises a sequence that shares at least about 90%, at least about 94%, at least about 95%, at least about 96%, at least about 97%, at least about 98%, or at least about 99%, sequence identity, homology and/or functional equivalence with a sequence resulting from the combination one or more SEQ ID NOS as described herein. It shall be appreciated that certain sequence variability, extensions, and/or truncations of the disclosed sequences may result when combining sequences, as a result of, for example, ease or efficiency in cloning (e.g., for creation of a restriction site). In several embodiments, there is provided a BCMA CAR construct that further comprises mbIL15, as disclosed herein (see e.g., FIG. 6, BCMA CARb). Additional information about anti-BCMA CARs for use in the presently disclosed methods and compositions can be found in U.S. Provisional Patent Application No. 62/960,285, which is incorporated in its entirety by reference herein.

[0536] In several embodiments, there is provided a polynucleotide encoding an anti HER2/CD8αhinge/CD8α transmembrane domain/OX40/CD3zeta chimeric antigen receptor complex (see FIG. 6, HER2 CARa). The polynucleotide comprises or is composed of an anti HER2 binding moiety, a CD8alpha hinge, a CD8α transmembrane domain, an OX40 domain, and a CD3zeta domain as described herein. In several embodiments, this receptor complex is encoded by a nucleic acid molecule comprising a sequence obtained from a combination of sequences disclosed herein, or comprises an amino acid sequence obtained from a combination of sequences disclosed herein. In several embodiments, the encoding nucleic acid sequence, or the amino acid sequence, comprises a sequence in accordance with one or more SEQ ID NOS as described herein, such as those included herein as examples of constituent parts. In several embodiments, the encoding nucleic acid sequence, or the amino acid sequence, comprises a sequence that shares at least about 90%, at least about 94%, at least about 95%, at least about 96%, at least about 97%, at least about 98%, or at least about 99%, sequence identity, homology and/or functional equivalence with a sequence resulting from the combination one or more SEQ ID NOS as described herein. It shall be appreciated that certain sequence variability, extensions, and/or truncations of the disclosed sequences may result when combining sequences, as a result of, for example, ease or efficiency in cloning (e.g., for creation of a restriction site). In several embodiments, there is provided a HER2 CAR construct that further comprises mbIL15, as disclosed herein (see e.g., FIG. 6, HER2 CARb).

[0537] In several embodiments, there is provided a polynucleotide encoding an NKG2D/CD8αhinge/CD8α transmembrane domain/OX40/CD3zeta activating chimeric receptor complex (see FIG. 6, NKG2D ACRa). The polynucleotide comprises or is composed of a fragment of the NKG2D receptor capable of binding a ligand of the NKG2D receptor, a CD8alpha hinge, a CD8α transmembrane domain, an OX40 domain, and a CD3zeta domain as described herein. In several embodiments, this receptor complex is encoded by a nucleic acid molecule comprising the nucleic acid sequence of SEQ ID NO: 145. In yet another embodiment, this chimeric receptor is encoded by the amino acid sequence of SEQ ID NO: 174. In some embodiments, the sequence of the chimeric receptor may vary from SEQ ID NO. 145, but remains, depending on the embodiment, at least 70%, at least 75%, at least 80%, at least 85%, at least 90%, or at least 95% homologous with SEQ ID NO. 145. In several embodiments, while the chimeric receptor may vary from SEQ ID NO. 145, the chimeric receptor retains, or in some embodiments, has enhanced, NK cell activating and/or cytotoxic function. Additionally, in several embodiments, this construct can optionally be co-expressed with mbIL15 (FIG. 7, NKG2D ACRb). Additional information about chimeric receptors for use in the presently disclosed methods and compositions can be found in PCT Patent Publication No. WO/2018/183385, which is incorporated in its entirety by reference herein.

[0538] In several embodiments, there is provided a polynucleotide encoding an anti CD70/CD8αhinge/CD8α transmembrane domain/OX40/CD3zeta chimeric antigen receptor complex (see FIG. 7, CD70 CARa). The polynucleotide comprises or is composed of an anti CD70 binding moiety, a CD8alpha hinge, a CD8α transmembrane domain, an OX40 domain, and a CD3zeta domain as described herein. In several embodiments, this receptor complex is encoded by a nucleic acid molecule comprising a sequence obtained from a combination of sequences disclosed herein, or comprises an amino acid sequence obtained from a combination of sequences disclosed herein. In several embodiments, the encoding nucleic acid sequence, or the amino acid sequence, comprises a sequence in accordance with one or more SEQ ID NOS as described herein, such as those included herein as examples of constituent parts. In several embodiments, the encoding nucleic acid sequence, or the amino acid sequence, comprises a sequence that shares at least about 90%, at least about 94%, at least about 95%, at least about 96%, at least about 97%, at least about 98%, or at least about 99%, sequence identity, homology and/or functional equivalence with a sequence resulting from the combination one or more SEQ ID NOS as described herein. It shall be appreciated that certain sequence variability, extensions, and/or truncations of the disclosed sequences may result when combining sequences, as a result of, for example, ease or efficiency in cloning (e.g., for creation of a restriction site). In several embodiments, there is provided a CD70 CAR construct that further comprises mbIL15, as disclosed herein (see e.g., FIG. 7, CD70 CARb). Additional information about anti-CD70 CAR for use in the presently disclosed methods and compositions can be found in U.S. Provisional Patent Application Nos. 63/038,645 and 63/090,041, which are each incorporated in their entirety by reference herein.

[0539] In several embodiments, there is provided a polynucleotide encoding an anti mesothelin/CD8α hinge/CD8α transmembrane domain/OX40/CD3zeta chimeric antigen receptor complex (see FIG. 7, Mesothelin CARa). The polynucleotide comprises or is composed of an anti mesothelin binding moiety, a CD8alpha hinge, a CD8α transmembrane domain, an OX40 domain, and a CD3zeta domain as described herein. In several embodiments, this receptor complex is encoded by a nucleic acid molecule comprising a sequence obtained from a combination of sequences disclosed herein, or comprises an amino acid sequence obtained from a combination of sequences disclosed herein. In several embodiments, the encoding nucleic acid sequence, or the amino acid sequence, comprises a sequence in accordance with one or more SEQ ID NOS as described herein, such as those included herein as examples of constituent parts. In several embodiments, the encoding nucleic acid sequence, or the amino acid sequence, comprises a sequence that shares at least about 90%, at least about 94%, at least about 95%, at least about 96%, at least about 97%, at least about 98%, or at least about 99%, sequence identity, homology and/or functional equivalence with a sequence resulting from the combination one or more SEQ ID NOS as described herein. It shall be appreciated that certain sequence variability, extensions, and/or truncations of the disclosed sequences may result when combining sequences, as a result of, for example, ease or efficiency in cloning (e.g., for creation of a restriction site). In several embodiments, there is provided a Mesothelin CAR construct that further comprises mblL15, as disclosed herein (see e.g., FIG. 7, Mesothelin CARb).

[0540] In several embodiments, there is provided a polynucleotide encoding an anti PD-L1/CD8αhinge/CD8α transmembrane domain/OX40/CD3zeta chimeric antigen receptor complex (see FIG. 7, PD-L1 CARa). The polynucleotide comprises or is composed of an anti PD-L1 binding moiety, a CD8alpha hinge, a CD8α transmembrane domain, an OX40 domain, and a CD3zeta domain as described herein. In several embodiments, this receptor complex is encoded by a nucleic acid molecule comprising a sequence obtained from a combination of sequences disclosed herein, or comprises an amino acid sequence obtained from a combination of sequences disclosed herein. In several embodiments, the encoding nucleic acid sequence, or the amino acid sequence, comprises a sequence in accordance with one or more SEQ ID NOS as described herein, such as those included herein as examples of constituent parts. In several embodiments, the encoding nucleic acid sequence, or the amino acid sequence, comprises a sequence that shares at least about 90%, at least about 94%, at least about 95%, at least about 96%, at least about 97%, at least about 98%, or at least about 99%, sequence identity, homology and/or functional equivalence with a sequence resulting from the combination one or more SEQ ID NOS as described herein. It shall be appreciated that certain sequence variability, extensions, and/or truncations of the disclosed sequences may result when combining sequences, as a result of, for example, ease or efficiency in cloning (e.g., for creation of a restriction site). In several embodiments, there is provided a PD-L1 CAR construct that further comprises mbIL15, as disclosed herein (see e.g., FIG. 7, PD-L1 CARb).

[0541] In several embodiments, there is provided a polynucleotide encoding an anti EGFR/CD8αhinge/CD8α transmembrane domain/OX40/CD3zeta chimeric antigen receptor complex (see FIG. 7, EGFR CARa). The polynucleotide comprises or is composed of an anti EGFR binding moiety, a CD8alpha hinge, a CD8α transmembrane domain, an OX40 domain, and a CD3zeta domain as described herein. In several embodiments, this receptor complex is encoded by a nucleic acid molecule comprising a sequence obtained from a combination of sequences disclosed herein, or comprises an amino acid sequence obtained from a combination of sequences disclosed herein. In several embodiments, the encoding nucleic acid sequence, or the amino acid sequence, comprises a sequence in accordance with one or more SEQ ID NOS as described herein, such as those included herein as examples of constituent parts. In several embodiments, the encoding nucleic acid sequence, or the amino acid sequence, comprises a sequence that shares at least about 90%, at least about 94%, at least about 95%, at least about 96%, at least about 97%, at least about 98%, or at least about 99%, sequence identity, homology and/or functional equivalence with a sequence resulting from the combination one or more SEQ ID NOS as described herein. It shall be appreciated that certain sequence variability, extensions, and/or truncations of the disclosed sequences may result when combining sequences, as a result of, for example, ease or efficiency in cloning (e.g., for creation of a restriction site). In several embodiments, there is provided a EGFR CAR construct that further comprises mbIL15, as disclosed herein (see e.g., FIG. 7, EGFR CARb).

[0542] In several embodiments, an expression vector, such as a MSCV-IRES-GFP plasmid, a non-limiting example of which is provided in SEQ ID NO: 87, is used to express any of the chimeric antigen receptors provided for herein.

### Methods of Treatment

[0543] Some embodiments relate to a method of treating, ameliorating, inhibiting, or preventing cancer with a cell or immune cell comprising a chimeric antigen receptor and/or an activating chimeric receptor, as disclosed herein. In some embodiments, the method includes treating or preventing cancer. In some embodiments, the method includes administering a therapeutically effective amount of immune cells expressing a tumor-directed chimeric antigen receptor and/or tumor-directed chimeric receptor as described herein. Examples of types of cancer that may be treated as such are described herein.

[0544] In certain embodiments, treatment of a subject with a genetically engineered cell(s) described herein achieves one, two, three, four, or more of the following effects, including, for example: (i) reduction or amelioration the severity of disease or symptom associated therewith; (ii) reduction in the duration of a symptom associated with a disease; (iii) protection against the progression of a disease or symptom associated therewith; (iv) regression of a disease or symptom associated therewith; (v) protection against the development or onset of a symptom associated with a disease; (vi) protection against the recurrence of a symptom associated with a disease; (vii) reduction in the hospitalization of a subject; (viii) reduction in the hospitalization length; (ix) an increase in the survival of a subject with a disease; (x) a reduction in the number of symptoms associated with a disease; (xi) an enhancement, improvement, supplementation, complementation, or augmentation of the prophylactic or therapeutic effect(s) of another therapy. Advantageously, the non-alloreactive engineered T cells disclosed herein further enhance one or more of the above. Administration can be by a variety of routes, including, without limitation, intravenous, intra-arterial, subcutaneous, intramuscular, intrahepatic, intraperitoneal and/or local delivery to an affected tissue.

### Administration and Dosing

[0545] Further provided herein are methods of treating a subject having cancer, comprising administering to the subject a composition comprising immune cells (such as NK and/or T cells) engineered to express a cytotoxic receptor complex as disclosed herein. For example, some embodiments of the compositions and methods described herein relate to use of a tumor-directed chimeric antigen receptor and/or tumor-directed chimeric receptor, or use of cells expressing a tumor-directed chimeric antigen receptor and/or tumor-directed chimeric receptor, for treating a cancer patient. Uses of such engineered immune cells for treating cancer are also provided.

[0546] In certain embodiments, treatment of a subject with a genetically engineered cell(s) described herein achieves one, two, three, four, or more of the following effects, including, for example: (i) reduction or amelioration the severity of disease or symptom associated therewith; (ii) reduction in the duration of a symptom associated with a disease; (iii) protection against the progression of a disease or symptom associated therewith; (iv) regression of a disease or symptom associated therewith; (v) protection against the development or onset of a symptom associated with a disease; (vi) protection against the recurrence of a symptom associated with a disease; (vii) reduction in the hospitalization of a subject; (viii) reduction in the hospitalization length; (ix) an increase in the survival of a subject with a disease; (x) a reduction in the number of symptoms associated with a disease; (xi) an enhancement, improvement, supplementation, complementation, or augmentation of the prophylactic or therapeutic effect(s) of another therapy. Each of these comparisons are versus, for example, a different therapy for a disease, which includes a cell-based immunotherapy for a disease using cells that do not express the constructs disclosed herein. Advantageously, the non-alloreactive engineered T cells disclosed herein further enhance one or more of the above.

[0547] Administration can be by a variety of routes, including, without limitation, intravenous, intra-arterial, subcutaneous, intramuscular, intrahepatic, intraperitoneal and/or local delivery to an affected tissue. Doses of immune cells such as NK and/or T cells can be readily determined for a given subject based on their body mass, disease type and state, and desired aggressiveness of treatment, but range, depending on the embodiments, from about 10⁵ cells per kg to about 10¹² cells per kg (e.g., 10⁵-10⁷, 10⁷-10¹⁰, 10¹⁰-10¹² and overlapping ranges therein). In one embodiment, a dose escalation regimen is used. In several embodiments, a range of immune cells such as NK and/or T cells is administered, for example between about 1×10⁶ cells/kg to about 1×10⁸ cells/kg. Depending on the embodiment, various types of cancer can be treated. In several embodiments, hepatocellular carcinoma is treated. Additional embodiments provided for herein include treatment or prevention of the following non-limiting examples of cancers including, but not limited to, acute lymphoblastic leukemia (ALL), acute myeloid leukemia (AML), adrenocortical carcinoma, Kaposi sarcoma, lymphoma, gastrointestinal cancer, appendix cancer, central nervous system cancer, basal cell carcinoma, bile duct cancer, bladder cancer, bone cancer, brain tumors (including but not limited to astrocytomas, spinal cord tumors, brain stem glioma, glioblastoma, craniopharyngioma, ependymoblastoma, ependymoma, medulloblastoma, medulloepithelioma), breast cancer, bronchial tumors, Burkitt lymphoma, cervical cancer, colon cancer, chronic lymphocytic leukemia (CLL), chronic myelogenous leukemia (CML), chronic myeloproliferative disorders, ductal carcinoma, endometrial cancer, esophageal cancer, gastric cancer, Hodgkin lymphoma, non-Hodgkin lymphoma, hairy cell leukemia, renal cell cancer, leukemia, oral cancer, nasopharyngeal cancer, liver cancer, lung cancer (including but not limited to, non-small cell lung cancer, (NSCLC) and small cell lung cancer), pancreatic cancer, bowel cancer, lymphoma, melanoma, ocular cancer, ovarian cancer, pancreatic cancer, prostate cancer, pituitary cancer, uterine cancer, and vaginal cancer.

[0548] In some embodiments, also provided herein are nucleic acid and amino acid sequences that have sequence identity and/or homology of at least 80%, 85%, 90%, 95%, 96%, 97%, 98%, 99% (and ranges therein) as compared with the respective nucleic acid or amino acid sequences of SEQ ID NOS. 1-174 (or combinations of two or more of SEQ ID NOS: 1-174) and that also exhibit one or more of the functions as compared with the respective SEQ ID NOS. 1-174 (or combinations of two or more of SEQ ID NOS: 1-174) including but not limited to, (i) enhanced proliferation, (ii) enhanced activation, (iii) enhanced cytotoxic activity against cells presenting ligands to which NK cells harboring receptors encoded by the nucleic acid and amino acid sequences bind, (iv) enhanced homing to tumor or infected sites, (v) reduced off target cytotoxic effects, (vi) enhanced secretion of immunostimulatory cytokines and chemokines (including, but not limited to IFNg, TNFa, IL-22, CCL3, CCL4, and CCL5), (vii) enhanced ability to stimulate further innate and adaptive immune responses, and (viii) combinations thereof.

[0549] Additionally, in several embodiments, there are provided amino acid sequences that correspond to any of the nucleic acids disclosed herein, while accounting for degeneracy of the nucleic acid code. Furthermore, those sequences (whether nucleic acid or amino acid) that vary from those expressly disclosed herein, but have functional similarity or equivalency are also contemplated within the scope of the present disclosure. The foregoing includes mutants, truncations, substitutions, or other types of modifications.

[0550] In several embodiments, polynucleotides encoding the disclosed cytotoxic receptor complexes are mRNA. In some embodiments, the polynucleotide is DNA. In some embodiments, the polynucleotide is operably linked to at least one regulatory element for the expression of the cytotoxic receptor complex.

[0551] Additionally provided, according to several embodiments, is a vector comprising the polynucleotide encoding any of the polynucleotides provided for herein, wherein the polynucleotides are optionally operatively linked to at least one regulatory element for expression of a cytotoxic receptor complex. In several embodiments, the vector is a retrovirus.

[0552] Further provided herein are engineered immune cells (such as NK and/or T cells) comprising the polynucleotide, vector, or cytotoxic receptor complexes as disclosed herein. Further provided herein are compositions comprising a mixture of engineered immune cells (such as NK cells and/or engineered T cells), each population comprising the polynucleotide, vector, or cytotoxic receptor complexes as disclosed herein. Additionally, there are provided herein compositions comprising a mixture of engineered immune cells (such as NK cells and/or engineered T cells), each population comprising the polynucleotide, vector, or cytotoxic receptor complexes as disclosed herein and the T cell population having been genetically modified to reduce/eliminate gvHD and/or HvD. In some embodiments, the NK cells and the T cells are from the same donor. In some embodiments, the NK cells and the T cells are from different donors.

[0553] Doses of immune cells such as NK cells or T cells can be readily determined for a given subject based on their body mass, disease type and state, and desired aggressiveness of treatment, but range, depending on the embodiments, from about 10⁵ cells per kg to about 10¹² cells per kg (e.g., 10⁵-10⁷, 10⁷-10¹⁰, 10¹⁰-10¹² and overlapping ranges therein). In one embodiment, a dose escalation regimen is used. In several embodiments, a range of NK cells is administered, for example between about 1×10⁶ cells/kg to about 1×10⁸ cells/kg. Depending on the embodiment, various types of cancer or infection disease can be treated.

### Cancer Types

[0554] Some embodiments of the compositions and methods described herein relate to administering immune cells comprising a tumor-directed chimeric antigen receptor and/or tumor-directed chimeric receptor to a subject with cancer. Various embodiments provided for herein include treatment or prevention of the following non-limiting examples of cancers. Examples of cancer include, but are not limited to, acute lymphoblastic leukemia (ALL), acute myeloid leukemia (AML), adrenocortical carcinoma, Kaposi sarcoma, lymphoma, gastrointestinal cancer, appendix cancer, central nervous system cancer, basal cell carcinoma, bile duct cancer, bladder cancer, bone cancer, brain tumors (including but not limited to astrocytomas, spinal cord tumors, brain stem glioma, craniopharyngioma, ependymoblastoma, ependymoma, medulloblastoma, medulloepithelioma), breast cancer, bronchial tumors, Burkitt lymphoma, cervical cancer, colon cancer, chronic lymphocytic leukemia (CLL), chronic myelogenous leukemia (CML), chronic myeloproliferative disorders, ductal carcinoma, endometrial cancer, esophageal cancer, gastric cancer, Hodgkin lymphoma, non-Hodgkin lymphoma, hairy cell leukemia, renal cell cancer, leukemia, oral cancer, nasopharyngeal cancer, liver cancer, lung cancer (including but not limited to, non-small cell lung cancer, (NSCLC) and small cell lung cancer), pancreatic cancer, bowel cancer, lymphoma, melanoma, ocular cancer, ovarian cancer, pancreatic cancer, prostate cancer, pituitary cancer, uterine cancer, and vaginal cancer.

### Cancer Targets

[0555] Some embodiments of the compositions and methods described herein relate to immune cells comprising a chimeric receptor that targets a cancer antigen. Non-limiting examples of target antigens include: CD19; TNF receptor family member B cell maturation (BCMA); CD38; DLL3; G protein coupled receptor class C group 5, member D (GPRC5D); epidermal growth factor receptor (EGFR) CD138; prostate-specific membrane antigen (PSMA); Fms Like Tyrosine Kinase 3 (FLT3); KREMEN2 (Kringle Containing Transmembrane Protein 2); ALPPL2 (Alkaline phosphatase, placental-like 2); CLDN4 (Claudin 4); CLDN6 (Claudin 6); CD123; CD22; CD30; CD171; CS1 (also referred to as CD2 subset 1, CRACC, SLAMF7, CD319, and 19A24); CD5, C-type lectin-like molecule-1 (CLL-1 or CLECLi); CD33; epidermal growth factor receptor variant III (EGFRviii); ganglioside G2 (GD2); ganglioside GD3 (aNeu5Ac(2-8)aNeu5Ac(2-3)bDGalp(I-4)bDGlcp(I-I)Cer); Tn antigen ((Tn Ag) or (GalNAca-Ser/Thr)); Receptor tyrosine kinase-like orphan receptor 1 (ROR1); Tumor-associated glycoprotein 72 (TAG72); CD44v6; a glycosylated CD43 epitope expressed on acute leukemia or lymphoma but not on hematopoietic progenitors, a glycosylated CD43 epitope expressed on non-hematopoietic cancers, Carcinoembryonic antigen (CEA); Epithelial cell adhesion molecule (EPCAM); B7H3 (CD276); KIT (CD117); Interleukin-13 receptor subunit alpha-2 (IL-13Ra2 or CD213A2); Mesothelin; Interleukin 11 receptor alpha (IL-IIRa); prostate stem cell antigen (PSCA); Protease Serine 21 (Testisin or PRSS21); vascular endothelial growth factor receptor 2 (VEGFR2); Lewis(Y) antigen; CD24; Platelet-derived growth factor receptor beta (PDGFR-beta); Stage-specific embryonic antigen-4 (SSEA-4); CD20; Folate receptor alpha (FRa or FR1); Folate receptor beta (FRb); Receptor tyrosine-protein kinase ERBB2 (Her2/neu); Mucin 1, cell surface associated (MUC1); epidermal growth factor receptor (EGFR); neural cell adhesion molecule (NCAM); Prostase; prostatic acid phosphatase (PAP); elongation factor 2 mutated (ELF2M); Ephrin B2; fibroblast activation protein alpha (FAP); insulin-like growth factor 1 receptor (IGF-I receptor), carbonic anhydrase IX (CAIX); Proteasome (Prosome, Macropain) Subunit, Beta Type, 9 (LMP2); glycoprotein 100 (gplOO); oncogene fusion protein consisting of breakpoint cluster region (BCR) and Abelson murine leukemia viral oncogene homolog 1 (Abl) (bcr-abl); tyrosinase; ephrin type-A receptor 2 (EphA2); sialyl Lewis adhesion molecule (sLe); ganglioside GM3 (aNeu5Ac(2-3)bDClalp(I-4)bDGlcp(I-l)Cer); transglutaminase 5 (TGS5); high molecular weight-melanoma associated antigen (HMWMAA); o-acetyl-GD2 ganglioside (OAcGD2); tumor endothelial marker 1 (TEM1/CD248); tumor endothelial marker 7-related (TEM7R); claudin 6 (CLDN6); thyroid stimulating hormone receptor (TSHR); chromosome X open reading frame 61 (CXORF61); CD97; CD179a; anaplastic lymphoma kinase (ALK); Polysialic acid; placenta-specific 1 (PLAC1); hexasaccharide portion of globoH glycoceramide (GloboH); mammary gland differentiation antigen (NY-BR-1); uroplakin 2 (UPK2); Hepatitis A virus cellular receptor 1 (HAVCRi); adrenoceptor beta 3 (ADRB3); pannexin 3 (PANX3); G protein-coupled receptor 20 (GPR20); lymphocyte antigen 6 complex, locus K 9 (LY6K); Olfactory receptor 51E2 (OR51E2); TCR Gamma Alternate Reading Frame Protein (TARP); Wilms tumor protein (WT1); Cancer/testis antigen 1 (NY-ESO-1); Cancer/testis antigen 2 (LAGE-la); Melanoma-associated antigen 1 (MAGE-A1); ETS translocation-variant gene 6, located on chromosome 12p (ETV6-AML); sperm protein 17 (SPA17); X Antigen Family, Member 1A (XAGE1); angiopoietin-binding cell surface receptor 2 (Tie 2); melanoma cancer testis antigen-1 (MAD-CT-1); melanoma cancer testis antigen-2 (MAD-CT-2); Fos-related antigen 1; tumor protein p53 (p53); p53 mutant; prostein; survivin; telomerase; prostate carcinoma tumor antigen-1 (PCT A-1 or Galectin 8), melanoma antigen recognized by T cells 1 (MelanA or MARTI); Rat sarcoma (Ras) mutant; human Telomerase; reverse transcriptase (hTERT); sarcoma translocation breakpoints; melanoma inhibitor of apoptosis (ML-IAP); ERG (transmembrane protease, serine 2 (TMPRSS2) ETS fusion gene); N-Acetyl glucosaminyl-transferase V (NA17); paired box protein Pax-3 (PAX3); Androgen receptor; Cyclin BI; v-myc avian myelocytomatosis viral oncogene neuroblastoma derived homolog (MYCN); Ras Homolog Family Member C (RhoC); Tyrosinase-related protein 2 (TRP-2); Cytochrome P450 IB 1 (CYPIB 1); CCCTC-Binding Factor (Zinc Finger Protein)-Like (BORIS or Brother of the Regulator oflmprinted Sites), Squamous Cell Carcinoma Antigen Recognized By T Cells 3 (SART3); Paired box protein Pax-5 (PAX5); proacrosin binding protein sp32 (OY-TES1); lymphocyte-specific protein tyrosine kinase (LCK); A kinase anchor protein 4 (AKAP-4); synovial sarcoma, X breakpoint 2 (SSX2); Receptor for Advanced Gly cation Endproducts (RAGE-1); renal ubiquitous 1 (RU1); renal ubiquitous 2 (RU2); legumain; human papilloma virus E6 (HPV E6); human papilloma virus E7 (HPV E7); intestinal carboxyl esterase; heat shock protein 70-2 mutated (mut hsp70-2); CD79a; CD79b; CD72; Leukocyte-associated immunoglobulin-like receptor 1 (LAIR1); Fc fragment of IgA receptor (FCAR or CD89); Leukocyte immunoglobulin-like receptor subfamily A member 2 (LILRA2); CD300 molecule-like family member f (CD300LF); C-type lectin domain family 12 member A (CLEC12A); bone marrow stromal cell antigen 2 (BST2); EGF-like module-containing mucin-like hormone receptor-like 2 (EMR2); lymphocyte antigen 75 (LY75); Glypican-3 (GPC3); Fc receptor-like 5 (FCRL5); and immunoglobulin lambda-like polypeptide 1 (IGLLI), MPL, Biotin, c-MYC epitope Tag, CD34, LAMP1 TROP2, GFRalpha4, CDH17, CDH6, NYBR1, CDH19, CD200R, Slea (CA19.9; Sialyl Lewis Antigen); Fucosyl-GMI, PTK7, gpNMB, CDH1-CD324, CD276/B7H3, ILI IRa, IL13Ra2, CD179b-IGLII, TCRgamma-delta, NKG2D, CD32 (FCGR2A), Tn ag, Timl-/HVCR1, CSF2RA (GM-CSFR-alpha), TGFbetaR2, Lews Ag, TCR-betal chain, TCR-beta2 chain, TCR-gamma chain, TCR-delta chain, FITC, Leutenizing hormone receptor (LHR), Follicle stimulating hormone receptor (FSHR), Gonadotropin Hormone receptor (CGHR or GR), CCR4, GD3, SLAMF6, SLAMF4, HIV1 envelope glycoprotein, HTLVI-Tax, CMV pp65, EBV-EBNA3c, KSHV K8.1, KSHV-gH, influenza A hemagglutinin (HA), GAD, PDL1, Guanylyl cyclase C (GCC), auto antibody to desmoglein 3 (Dsg3), auto antibody to desmoglein 1 (Dsgl), HLA, HLA-A, HLA-A2, HLA-B, HLA-C, HLA-DP, HLA-DM, HLA-DOA, HLA-DOB, HLA-DQ, HLA-DR, HLA-G, IgE, CD99, Ras G12V, Tissue Factor 1 (TF1), AFP, GPRC5D, Claudinl 8.2 (CLD18A2 or CLDN18A.2)), P-glycoprotein, STEAPI, Livl, Nectin-4, Cripto, gpA33, BST1/CD157, low conductance chloride channel, and the antigen recognized by TNT antibody.

### EXAMPLES

[0556] The following are non-limiting descriptions of experimental methods and materials that were used in examples disclosed below.

### Example 1—Gene Editing of Immune Cells to Alter Cell Function

[0557] To further build on various embodiments disclosed herein, several genes that mediate NK function through different pathways were selected in order to evaluate the impact of reducing/eliminating their expression through gene editing techniques. These initial targets represent non-limiting examples of the type of gene that can be edited according to embodiments disclosed herein to enhance one or more aspect of immune cell-mediated immunotherapy, whether utilizing engineered NK cells, engineered T cells, or combinations thereof. The tumor microenvironment (TME), as suggested with the nomenclature, is the environment around a tumor, which includes the surrounding blood vessels and capillaries, immune cells circulating through or retained in the area, fibroblasts, various signaling molecules related by the tumor cells, the immune cells or other cells in the area, as well as the surrounding extracellular matrix. Various mechanisms are employed by tumors to evade detection and/or destruction by host immune cells, including modification of the TME. Tumors may alter the TME by releasing extracellular signals, promoting tumor angiogenesis or even inducing immune tolerance, in part by limiting immune cell entry in the TME and/or limiting reproduction/expansion of immune cells in the TME. The tumor can also modify the ECM, which can allow pathways to develop for tumor extravasation to new sites. Transforming Growth-Factor beta (TGFb) has beneficial effects when reducing inflammation and preventing autoimmunity. However, it can also function to inhibit anti-tumor immune responses, and thus, upregulated expression of TGFb has been implicated in tumor progression and metastasis. TGFb signaling can inhibit the cytotoxic function of NK cells by interacting with the TGFb receptor expressed by NK cells, for example the TGFb receptor isoform II (TGFBR2). In accordance with several embodiments disclosed herein, the reduction or elimination of expression of TGFBR2 through gene editing (e.g., by CRISPr/Cas9 guided by a TGFBR2 guide RNA) interrupts the inhibitory effect of TGFb on NK cells.

[0558] As discussed above, the CRISPR/Cas9 system was used to specifically target and reduce the expression of the TGFBR2 by NK cells. Various non-limiting examples of guide RNAs were tested, which are summarized below.

TABLE 2
TGFb Receptor Type 2 Isoform Guide RNAs

| SEQ ID NO: | Name | Sequence | Target |
|---|---|---|---|
| 147 | TGFBR2-1 | CCCCTACCATGACTTTATTC | Exon 4 |
| 148 | TGFBR2-2 | ATTGCACTCATCAGAGCTAC | Exon 4 |
| 149 | TGFBR2-3 | AGTCATGGTAGGGGAGCTTG | Exon 4 |
| 150 | TGFBR2-4 | TGCTGGCGATACGCGTCCAC | Exon 1 |
| 151 | TGFBR2-5 | GTGAGCAATCCCCCGGGCGA | Exon 4 |
| 152 | TGFBR2-6 | AACGTGCGGTGGGATCGTGC | Exon 1 |

[0559] Briefly, cryopreserved purified NK cells were thawed on Day 0 and subject to electroporation with CRISPr/Cas9 and a single (or two) guide RNA (using established commercially available transfection guidelines) and were then subsequently cultured in 400 IU/ml IL-2 media for 1 day, followed by 40 IU/ml IL-2 culture with feeder cells (e.g., modified K562 cells expressing, for example, 4-1 BBL and/or mbIL15). At Day 7, knockout efficiency was determined and NK cells were transduced with a virus encoding the NK19-1 CAR construct (as a non-limiting example of a CAR). At Day 14, the knockout efficiency was determined by flow cytometry or other means and cytotoxicity of the resultant NK cells was evaluated.

[0560] Flow cytometry analysis of TGFBR2 expression is shown in FIGS. 9A-9G. FIG. 9A shows control data in which NK cells were exposed to mock CRISPr/Cas9 gene editing conditions (nonsense or missing guide RNA). As shown, about 21% of the NK cells are positive for TGFBR2 expression. When the CRISPr/Cas9 machinery was guided using guide RNA 1 (SEQ ID NO. 147) TGFBR2 expression was not reduced (see FIG. 9B). Similar results are shown in FIGS. 9C and 9D, where guide RNA 2 (SEQ ID NO. 148) and guide RNA 3 (SEQ ID NO. 149) used individually had limited impact on TGFRB2 expression. In contrast, combinations of guide RNAs resulted in reduced TGFBR2 expression.

[0561] FIG. 9E shows results from the combination of guide RNA 1 (SEQ ID NO. 147) and guide RNA 2 (SEQ ID NO. 148) and FIG. 9F shows expression of TGFBR2 after use of the combination of guide RNA 1 (SEQ ID NO. 147) and guide RNA 3 (SEQ ID NO. 149). In each case, TGFBR2 expression was reduced by ˜50% as compared to the use of the guide RNAs alone (˜11-12% expression). FIG. 9G shows a marked reduction in TGFBR2 expression when both guide RNA 2 (SEQ ID NO. 148) and guide RNA 3 (SEQ ID NO. 149), with only ˜1% of the NK cells expressing TGFBR2. Next Generation Sequencing was used to confirm the flow cytometry expression analysis. These data are shown in FIGS. 10A-10G, which correspond to the respective guide RNAs in FIGS. 9A-9G. These data confirm that guide RNAs used with a CRISPr/Cas system can reduce expression of a specific target molecule, such as TGFBR2 on NK cells. According to several embodiments, a combination of guide RNAs, such as TGFBR guide RNA 2 and guide RNA 3 work synergistically together to essentially eliminate expression of the TGFBR2 by NK cells.

[0562] Building on these expression knockout experiments, the ability of TGFb to inhibit the cytotoxicity of TGFBR2 knockout NK cells was evaluated. To do so, NK cells were subject to TGFBR2 gene editing as discussed above, and at 21 days post-electroporation with the gene editing machinery, the cytotoxicity of the resultant cells was evaluated against REH tumor cells at 1:1 and 1:2 effector:target ratios and in the absence (closed circles) or presence of TGFb (20 ng/mL; open squares). Data are summarized in FIGS. 11A-11D. FIG. 11A shows data related to the combination of guide RNA 1 and 2. As evidenced by the decrease in the detected percent cytotoxicity at both 1:1 and 1:2 ratios with the addition of TGFb, these data are in line with the expression data discussed above, in that the presence of TGFBR2 (due to limited reduction in the expression of the receptor) allows TGFb to inhibit the cytotoxic activity of the NK cells. FIG. 11D shows mock results, with a similar cytotoxicity pattern to that shown in FIG. 11A. FIG. 11B shows similar data in that the presence of TGFb reduced the cytotoxicity of NK cells at a 1:1 target ratio when guide RNAs 1 and 3 were used to knock down TGFBR2 expression. At a 1:2 target ratio, the NK cells exhibited the same degree of cytotoxicity (reduced as compared to TGFBR2 knock down NK cells alone) whether TGFb was present or not. In contrast to the other experimental conditions, and in line with the expression data, FIG. 11C shows the cytotoxicity of NK cells edited with CRISPr using both guide RNAs 2 and 3. Despite the presence of TGFb at concentrations that reduced the cytotoxicity of the other NK cells tested, these NK cells that essentially lack TGFBR2 expression due to the gene editing show negligible fall off in cytotoxicity. These data show that, according to several embodiments, disclosed herein, use of gene editing techniques to disrupt, for example, expression of a negative regulator of immune cell activity results in an enhanced cytotoxicity and/or persistence of immune cells as disclosed herein.

[0563] FIGS. 12A-12F present flow cytometry data related to additional guide RNAs directed against TGFBR2 (see Table 2). FIG. 12A shows negative control evaluation of expression of TGFBR2 by NK cells (e.g., NK cells not expressing TGFBR2). FIG. 12B shows positive control data for NK cells that were not electroporated with CRISPr/Cas9 gene editing machinery, thus resulting in ˜37% expression of TGFBR2 by the NK cells. FIGS. 12C, 12D and 12E show TGFBR2 expression by NK cells that were subject to CRISPr/Cas9 editing and guided by guide RNA 4 (SEQ ID NO. 150), guide RNA 5 (SEQ ID NO. 151), or guide RNA 6 (SEQ ID NO. 152), respectively. Guide RNA 4 resulted in modest knock down of TGFBR2 expression (˜10% reduced compared to positive control). In contrast, guide RNA 5 and guide RNA 6 each reduced TGFBR2 expression significantly, by about 33% and 28%, respectively. These two single guide RNAs were on par the with the reduction seen (discussed above) with the combination of guide RNA 2 and guide RNA 3 (additional data shown in FIG. 12F. In accordance with several embodiments discussed herein, engineered immune cells are subjected to gene editing, such that the resultant immune cell is engineered to express a chimeric construct that imparts enhanced cytotoxicity to the engineered cell. In addition, such cells are genetically modified, for example to dis-inhibit the immune cells by disrupting at least a portion of an inhibitory pathway that functions to decrease the activity or persistence of the immune cell. To confirm that gene editing and expression of cytotoxic constructs are compatible, as disclosed herein, expression of a non-limiting example of a chimeric antigen receptor construct targeting CD19 (here identified as NK19-1) was evaluated subsequent to gene editing to knock down TGFBR2 expression. These data are shown in FIGS. 13A-13F

[0564] FIG. 13A shows a negative control assessment of expression of a non-limiting example of an anti-CD19 directed CAR (NK19-1). Here, NK cells were not transduced with the NK19-1 construct. In contrast, FIG. 13B shows positive control expression of NK19-1 by non-electroporated NK cells (as a control to account for lack of processing through a CRISPr gene-editing protocol. FIG. 13C shows the expression of NK19-1 by NK cells that were subject to TGFBR2 knock down through the use of CRISPr/Cas9 and guide RNA 4. As shown, there is only a nominal reduction in NK19-1 expression after gene editing with CRISPr. According to some embodiments, depending on the guide RNA and/or the mechanism for gene editing (e.g., CRISPr vs. TALEN), the slight change in CAR expression is reduced and/or eliminated. This can be seen, for example, in FIG. 13D, wherein the use of guide RNA 5 resulted in an even smaller change in NK19-1 expression by the NK cells. FIGS. 13E and 13F show data for guide RNA 6 alone, as well as guide RNA 2+3 (respectively). Taken together, these data indicate that the two approaches that are used in accordance with several embodiments disclosed herein, namely gene editing and genetic modification to induce expression of a chimeric receptor, are compatible with one another in that the process of editing the immune cell to reduce/remove expression of a negative regulator of immune cell function does not prevent the robust expression of a chimeric receptor construct. In fact, in several embodiments, gene editing and engineering of the immune cells results in a more efficacious, potent and/or longer lasting cytotoxic immune cell.

[0565] FIGS. 14A-14D show the methods and the results of an assessment of the cytotoxicity of NK cells that are subjected to gene editing (e.g., gene knockout) and/or genetic engineering (e.g., CAR expression) and their respective controls. Starting first with FIG. 14D, at Day 0, NK cells were subject to electroporation with the CRISPr/Cas9 components for gene editing, along with one (or a combination of) the indicated guide RNAs. NK cells were cultured in high-IL2 media for one day, followed by 6 additional days in culture with low IL2 and feeder cells (as discussed above). At Day 7, NK cells were transduced with the indicated anti-CD19 CAR viruses. Seven days later, the Incucyte cytotoxicity assay was performed in the presence of 20 ng/mL TGF-beta. As discussed above, TGF-beta is a potent immune suppressor that is released from the tumor cells and permeates the tumor microenvironment in vivo, in an attempt to decrease the effectiveness of immune cells in eliminating the tumor. Results are shown in FIG. 14A. As shown, in the top trace, Nalm6 cells grown alone expand robustly over the duration of the experiment. NK cells that were not electroporated (no gene editing or CAR expression; UN-EP NK) caused reduction in Nalm6 expansion. Reducing Nalm6 proliferation even further were NK cells that were subject to both gene editing and engineered CAR expression (TGFBR-4 CAR19 and TGFBR-6 CAR19). These results firstly demonstrate that these two techniques (e.g., editing and engineering) are compatible with one another and show that cytotoxicity can be enhanced in the resultant immune cells, in particular by engendering a resistance in the cells to immune suppressors in the tumor microenvironment, like TGF-beta. NK cells that were subject to electroporation, but not engineered to express a CAR (EP NK) reduced Nalm6 growth. Most notable, however, were the dramatic inhibition of Nalm6 expansion resulting from the use of NK cells engineered to express CAR19-1 (as a non-limiting example of a CAR) and which were also subject to knockout of TGFBR2 expression through either the combination of guide RNA 2 and guide RNA 3 (TGFBR-2+3 CAR19) or through the use of the single guide RNA, guide RNA 5 (TGFBR-5 CAR19). These data further evidence that, according to several embodiments disclosed herein, there a robust enhancement of the cytotoxicity of immune cells can be realized through a synergistic combination of reducing an inhibitory pathway (e.g., reduction in the inhibitory effects of TGFb by knockout of the TGFBR2 on immune cells through gene editing) and introducing a cytotoxic signaling complex (e.g., through engineering of the cells to express a CAR). FIGS. 14B and 14C show control data and selected data from FIG. 14A, respectively. FIG. 14B shows the significant cytotoxic effects of all constructs tested against Nalm6 cells alone (e.g., not recapitulating the immune suppressive effect of the tumor microenvironment). Each construct tested effectively eliminated tumor cell growth. In FIG. 14C, the tumor challenge experiments were performed in the presence of 20 ng/mL of TGF-beta to recapitulate the tumor microenvironment. FIG. 14C is selected data from 14A, to show the effects of gene editing to knockout the TGFB2 receptor more clearly. Cells engineered to express NK19-1 (as a non-limiting example of a CAR) showed the ability to reduce tumor growth as compared to controls. However, NK cells expressing NK19-1 and engineered (through CRISPR/Cas9 gene editing and the use of the non-limiting examples of guide RNAs) showed even more significant reductions in growth of tumor cells. Thus, according to several embodiments, leading to results such as those shown in FIG. 14A (and 14C), these gene editing techniques can be used to enhance the cytotoxicity of NK cells, even in the immune suppressive tumor microenvironment. In several embodiments, analogous techniques can be used on T cells. Additionally, in several embodiments, analogous approaches are used on both NK cells and T cells. Further, in additional embodiments, gene editing is used to engender edited cells, whether NK cells, T cell, or otherwise, resistance to one or more immune suppressors found in a tumor microenvironment.

[0566] To evaluate the potential mechanisms by which the modified immune cells exert their increased cytotoxic activity the cytokine release profile of each of the types of cells tested was evaluated, the data being shown in FIGS. 15A-15D. In brief, each of the NK cell groups were treated with TGFb 1 at a concentration of 20 ng/mL overnight prior inception of the cytotoxicity assay. The NK cells were washed to remove TGFb prior to co-culture of the NK cells with Nalm6 tumor cells. NK cells were co-cultured with Nalm6 tumor cells expressing nuclear red fluorescent protein (Nalm6-NR) at an E:T ratio of 1:1 (2×10⁴ effector: 2×10⁴ target cells). Cytokines were measured by Luminex assay. As shown in FIG. 15A, there was a modest increase in the release of IFNg when TGFBR2 expression was reduced by gene editing (see for example the histogram bar for “TGFBR2+3 Nalm6 NR”). Introduction of the anti-CD19 CAR induced a substantial increase in IFNg production (EP+NK19-1 Nalm6-NR). Most notably, however, are the last four groups shown in FIG. 15A (see dashed box), which represent the use of either single guide RNAs, or a combination of guide RNAs, to direct the CRISPr/Cas9-mediated knockdown of expression of the TGFBR2 in combination with the expression of an anti-CD19 CAR. The release of these increased amounts of IFNg are, at least in part, responsible for the enhanced cytotoxicity seen using these doubly-modified immune cells. Similar to IFNg, GM-CSF release was significantly enhanced in these groups. GM-CSF can promote the differentiation of myeloid cells and also as an immunostimulatory adjuvant, thus it's increased release may play a role in the increased cytotoxicity seen with these cells. Similar patterns are seen when assessing the release of Granzyme B (a potent cytotoxic protein released by NK cells) and TNFalpha (another potent cytokine). These data further evidence that increased release of various cytokines are at play in causing the substantial increase in cytotoxicity seen with the gene edited and genetically modified immune cells, as in accordance with several embodiments disclosed herein, as the gene editing aids in resisting immune suppressive effects that would be seen in the tumor microenvironment.

[0567] In accordance with additional embodiments, a disruption of, or elimination of, expression of a receptor, pathway or protein on an immune cell can result in the enhanced activity (e.g., cytotoxicity, persistence, etc.) of the immune cell against a target cancer cell. In several embodiments, this results from a disinhibition of the immune cell. Natural killer cells, express a variety of receptors, such particularly those within the Natural Killer Group 2 family of receptors. One such receptor, according to several embodiments disclosed herein, the NKG2D receptor, is used to generate cytotoxic signaling constructs that are expressed by NK cells and lead to enhanced anti-cancer activity of such NK cells. In addition, NK cells express the NKG2A receptor, which is an inhibitory receptor. One mechanism by which tumors develop resistance to immune cells is through the expression of peptide-loaded HLA Class I molecules (HLA-E), which suppresses the activity of NK cells through the ligation of the HLA-E with the NKG2A receptor. Thus, while one approach could be to block the interaction of the HLA-E with the expressed NKG2A receptors on NK cells, according to several embodiments disclosed herein, the expression of NKG2A is disrupted, which short circuits that inhibitory pathway and allows enhanced NK cell cytotoxicity.

[0568] FIGS. 16A-16D show data related to the disruption of expression of NKG2A expression by NK cells. As discussed above with TGFBR2, CRISPr/Cas9 was used to disrupt NKG2A expression using the non-limiting examples of guide RNAs show below in Table 3.

TABLE 3
NKG2A Guide RNAs

| SEQ ID NO: | Name | Sequence | Target |
|---|---|---|---|
| 158 | NKG2A-1 | GGAGCTGATGGTAAATCTGC | Exon 4 |
| 159 | NKG2A-2 | TTGAAGGTTTAATTCCGCAT | Exon 3 |
| 160 | NKG2A-3 | AACAACTATCGTTACCACAG | Exon 4 |

[0569] FIG. 16A shows control NKG2A expression by NK cells, with approximately 70% of the NK cells expressing NKG2A. FIG. 16B demonstrates that significant reductions in NKG2A expression can be achieved, with the use of guide RNA 1 reducing NKG2A expression by over 50%. FIG. 16C shows a more modest reduction in NKG2A expression using guide RNA 2, with just under 30% of the NK cells now expressing NKG2A. FIG. 16D shows that use of guide RNA 3 provides the most robust disruption of NKG2A expression by NK cells, with only ˜12% of NK cells expressing NKG2A.

[0570] FIG. 17A shows summary cytotoxicity data related to the NK cells with reduced NKG2A expression against Reh tumor cells at 7 days post-electroporation with the gene editing machinery. NK cells were tested at both a 2:1E:T and a 1:1E:T ratio. At 1:1E:T, each of the gene edited NK cell types induced a greater degree of cytotoxicity than the mock NK cells. The improved cytotoxicity detected with guide RNA 1 and guide RNA 2 treated NK cells were slightly enhanced over mock. The guide RNA that induced the greatest disruption of NKG2A expression on NK cells also resulted in the greatest increase of cytotoxicity as compared to mock (see 1:1 NKG2A-gRNA3). At a 2:1 ratio, each of the modified NK cell types significantly outperformed mock NK cells. As with the lower ratio, NK cells edited using guide RNA3 to target the CRISPr/Cas9 showed the most robust increase in cytotoxicity, an inverse relationship with the degree of NKG2A expression disruption. As discussed above, the interaction of HLA-E on tumor cells with the NKG2A on NK cells, absent intervention, can inhibit the NK cell activity. FIG. 17B confirms that Reh tumor cells do in fact express HLA-E molecules, and therefore, in the absence of the gene editing to disrupt NKG2A expression on the NK cells, would have been expected to inhibit NK cell signaling (as seen with the Mock NK cell group in FIG. 17A).

[0571] While the disruption of the HLA-E/NKG2A interaction had a clear positive impact on cytotoxicity of NK cells, other pathways were investigated that may impact immune cell signaling. One such example is the CIS/CISH pathway. Cytokine-inducible SH2-containing protein (CIS) is a negative regulator of IL-15 signaling in NK cells, and is encoded by CISH gene in humans. IL-15 signaling can have positive impacts on the NK cell expansion, survival, cytotoxicity and cytokine production. Thus, a disruption of CISH could render NK cells more sensitive to IL-15, thereby increasing their anti-tumor effects.

[0572] As discussed above, CRISPr/CAs9 was used to disrupt expression of CISH, though in additional embodiments, other gene editing approaches can be used. Non-limiting examples of CISH-targeting guide RNAs are shown below in Table 4.

TABLE 4
CISH Guide RNAs

| SEQ ID NO: | Name | Sequence | Target |
|---|---|---|---|
| 153 | CISH-1 | CTCACCAGATTCCCGAAGGT | Exon 2 |
| 154 | CISH-2 | CCGCCTTGTCATCAACCGTC | Exon 3 |
| 155 | CISH-3 | TCTGCGTTCAGGGGTAAGCG | Exon 1 |
| 156 | CISH-4 | GCGCTTACCCCTGAACGCAG | Exon 1 |
| 157 | CISH-5 | CGCAGAGGACCATGTCCCCG | Exon 1 |

[0573] As with NKG2A knockout NK cells, CISH knockout (using guide RNA 1 or Guide RNA 2 (data not shown for CISH-3-5)) gene edited NK cells were challenged with Reh tumor cells at a 1:1 and 2:1E:T ratio 7 days after being electroporated with the gene editing machinery. FIG. 18 shows that while mock NK cells exhibited over 50% cytotoxicity against Reh cells at 1:1, each of the gene edited NK cell groups showed nearly 20% improved cytotoxicity, with an average of ˜70% cytotoxicity against Reh cells. The enhanced cytotoxicity was even more pronounced at a 2:1 ratio. While Mock NK cells killed about 65% of Reh cells, NK cells edited with CISH guide RNA 2 killed approximately 85% of Reh cells and NK cells edited with CISH guide RNA 1 killed over 90% of Reh cells. These data clearly show that CISH knockout has a positive impact on NK cell cytotoxicity, among other positive effects as discussed above.

[0574] As with experiments described above, it was next evaluated whether the knockdown of CISH expression adversely impacted the ability to further modify the NK cells, for example, by transducing with a non-limiting example of a CAR (here an anti-CD19 CAR, CAR19-1). These data are shown in FIGS. 19A-19D. FIG. 19A shows negative control data for (lack of) expression of a CD19 CAR (based on detection of a Flag tag included in the CAR19-1 construct used, though some embodiments do not employ a Flag, or other, tag). FIG. 19B shows robust expression of the CD19-1 CAR by NK cells previously subjected to gene editing targeted by the CISH guide 1 RNA. FIG. 19C shows similar data for NK cells previously subjected to gene editing targeting by the CISH guide 2 RNA. FIG. 19D shows additional control data, with NK cells exposed to gene editing electroporation protocol, but without actual gene editing, thus demonstrating that the gene editing protocol itself does not adversely affect subsequent transduction of NK cells with CAR-encoding viral constructs. FIG. 20C shows a Western blot confirming the absence of expression of CIS protein (encoded by CISH) after the CISH gene editing was performed. Thus, according to some embodiments, NK cells (or T cells) are both edited, e.g., to knockout CISH expression in order to enhance one or more NK cell (T cell) characteristics through IL15-mediated signaling and are also engineered to express an anti-tumor CAR. The engineering and editing, in several embodiments, yield synergistic enhancements to NK cell function (e.g., expansion, cytotoxicity, and or persistence).

[0575] Having established that NK cells could be gene edited to reduce CISH expression and could also be engineered thereafter to express a CAR, the cytotoxicity of such doubly modified NK cells was tested. FIG. 20A shows the results of an Incucyte cytotoxicity assay where the indicated NK cell types were challenged with Nalm6 cells at a 1:2 ratio. Regarding the experimental timeline, at Day 0, NK cells were subjected to electroporation with CRISPr/Cas9, and the various CISH guide RNAs, as discussed above. The NK cells were cultured for 1 day in high IL-2 media, then moved to a low-IL-2 media where they were co-cultured with K562 cells modified to express 4-1 BB and membrane-bound IL15 for expansion. At day 7, the NK cells were transduced with the CAR19-1 viral constructs and cultured for another 7 days, with the IncuCyte cytotoxicity assay performed on Day 14.

[0576] As seen in FIG. 20A, both electroporated and un-electroporated NK cells (EP NK, UEP NK, respectively) showed nominal reduction in Nalm6 growth. When gene-edited NK cells were assessed, CISH-1 and CISH-2 NK cells both exhibited significant prevention of Nalm6 growth. Likewise, both electroporated and un-electroporated NK cells expression CAR19-1 further reduced Nalm6 proliferation. Most notably, the doubly modified CISH knockouts that express CAR19-1 exhibited complete control/prevention of Nalm6 cell growth. These results represent the synergistic activities between the two modification approaches undertaken, with gene edited CISH knockout NK cells expressing CAR19-1 showing robust anti-tumor activity, which is in accordance with embodiments disclosed herein.

[0577] These tumor-controlling effects were recapitulated in a dual challenge model as well. In this case, the experimental timeline was as described above for FIG. 20A, however, 7 days after the inception of the IncuCyte assay (performed here at 1:1E:T), the wells were washed and re-challenged with an additional dose of Nalm6 tumor cells (20K cells per well). Data are shown in FIG. 20B. As with the single tumor cell challenge, Nalm6 cells exhibited expansion throughout the experiment, with EP and UEP NK cells allowing similar overall Nalm6 growth after the second challenge. Even with the second challenge of Nalm6 tumor cells, NK cells expression CAR19-1 constructs (EPCAR19 and UEPCAR19) curtailed Nalm6 growth more so than NK cells alone. Interestingly, with the second challenge, NK cells that were gene edited to knockout CISH expression exhibited a modestly enhanced ability to prevent Nalm6 growth as compared to those expressing CAR19-1. As discussed above, this may be due to the enhanced signaling through various metabolic pathways that are upregulated due to CISH knockout. Notably, as with the single challenge, the doubly modified NK cells that were gene edited to knockout CISH expression and engineered to express CAR19-1 showed substantial ability to prevent Nalm6 cell growth. CISH guide RNA 1 and CISH guide RNA 2 treated NK cells were on par with one another until the final stages of the experiment, where CISH guide RNA 2 treated NK cells allowed a slight increase in Nalm6 cell number. Regardless, these data show that the doubly modified NK cells possess an enhanced cytotoxic ability against tumor cells. As mentioned above, the editing coupled with engineered approach in several embodiments advantageously results in non-duplicative enhancements to NK cell function, which can synergistically enhance one or more aspects of the NK cells (such as activation, cytotoxicity, persistence etc.).

[0578] Mechanistically, without being bound by theory, it appears that the double modification of knockdown of CISH and expression of CAR19-1 allow NK cells to survive for a longer period of time, thus imparting them with an enhanced persistence against tumor cells. In several embodiments, this is due, at least in part to the enhanced signaling through various metabolic pathways in the edited cells based on knockout of CISH. Data for this analysis are shown in FIG. 21A, where cell counts were obtained for the indicated groups across 74 days in culture. Six of the eight groups tested showed a steady decline in NK cell count from about 2-3 weeks in culture, through the 74 day time point. However, the two groups of NK cells that were treated both to knockdown CISH expression and to express CAR19-1 exhibited relatively steady population size (but for a transient increase at day 24). These data suggest that the doubly modified NK cells are better able to survive than NK cells modified in only one manner (or unmodified), which may, in part, lead to their enhanced efficacy over a longer-term experiment like the secondary tumor cell challenge shown in FIG. 20B. Additionally, FIG. 21B shows cytotoxicity data for control Nalm6 cells, unmodified NK cells, CISH knockout NK cells and CISH knockout NK cells expressing CD19 CAR. This experiment was performed after each of the cell groups had been cultured for 100 days in culture. Nalm6 cells alone exhibited expansion, as expected. Control knockout NK cells (subject to electroporation only) delayed Nalm6 expansion at the initial stages, but eventually, Nalm6 cells expanded. CISH knockout NK cells showed good anti-tumor effects, with only modest increases in Nalm6 numbers at the later stages of the experiment. The cytotoxicity of NK cells at this late stage of culture is unexpected, given the growth allowed by the control NK cells. As discussed above, in several embodiments the knockout of CISH expression allows greater signaling through various IL15 responsive pathways that lead to one or more of enhanced NK (or T) cell proliferation, cytotoxicity, and/or persistence.

[0579] Further investigating the mechanisms by which these doubly modified cells are able to generate significant and persistent cytotoxicity, the cytokine release profiles of each group were assessed. These data are shown in FIGS. 22A-22E, with those groups of NK cells engineered to express CAR19-1 indicated by placement above the “CAR19” line on the right portion of each histogram.

[0580] FIG. 22A shows data related to IFNg production, which is notably increased when CISH is knocked out through use of CRISPr/Cas9 and either guide RNA 1 or 2 (as non-limiting embodiments of guide RNA). More interestingly, the combination of CISH knockout and CAR19-1 expression results in nearly 2.5 times more IFNg production than the CISH knockouts and 4-5 times more than any of the other groups. Similar data are shown in FIG. 22B, with respect to TNFalpha production. Likewise, while the CISH knockouts alone and the CISH-normal NKs expressing CAR19-1 release somewhat more GM-CSF, the doubly modified CISH knockout and CAR19-1-expressing NK cells show markedly increased GM-CSF release. Granzyme B release profiles, shown in FIG. 22D, again demonstrates that the doubly modified cells release the most cytokine. Interestingly the levels of Granzyme B expression correlate with the cytotoxicity profiles of the CISH 1 and CISH 2 NK cell groups. Both the CISH 2 NK and CISH 2/CAR19 groups release less Granzyme B than their CISH 1 counterparts, which is reflected in the longer term cytotoxicity data of FIG. 20B, suggesting that reduced CISH expression may be inversely related to Granzyme B release. Finally, FIG. 22E shows release of perforin, which is significantly higher for all NK cell groups, and does not reflect the same patterns seen in FIGS. 22A-22D, suggesting perforin is not a cytotoxicity-limiting cytokine, in these embodiments. However, these data do confirm that immune cells that are subjected to the combination of gene editing (e.g., to reduce expression of an inhibitory factor expressed by the immune cell or to reduce the ability of the immune cell to respond to an inhibitory factor) and the engineering of the cell to express a chimeric cytotoxic signaling complex (such as, for example, a cytotoxicity inducing CAR). In several embodiments, the doubly modified cells exhibit a more robust (e.g., cytotoxicity-inducing) cytokine profile and/or show increased viability/persistence, which allows a greater overall anti-tumor effect, as in accordance with several embodiments disclosed herein. In several embodiments, the double modification of immune cells therefore leads to an overall more efficacious cancer immunotherapy regime, whether using NK cells, T cells, or combinations thereof. Additionally, as discussed above, in several embodiments, the doubly modified cells are also modified in order to reduce their alloreactivity, thereby allowing for a more efficacious allogeneic cell therapy regimen.

[0581] CBLB is an E3 ubiquitin ligase that is known to limit T cell activation. In order to determine if disruption of expression of CBLB by NK cells could elicit a more robust anti-tumor response from engineered NK cells, as discussed above, CRISPR/Cas9 was used to disrupt expression of CBLB, though in additional embodiments, other gene editing approaches can be used.

[0582] Non-limiting examples of CBLB-targeting guide RNAs are shown below in Table 5.

TABLE 5
CBLB Guide RNAs

| SEQ ID NO: | Name | Sequence | Target |
|---|---|---|---|
| 164 | CBLB-1 | TAATCTGGTGGACCTCATGAAGG | Exon 5 |
| 165 | CBLB-2 | TCGGTTGGCAAACGTCCGAAAGG | Exon 10 |
| 166 | CBLB-3 | AGCAAGCTGCCGCAGATCGCAGG | Exon 2 |

[0583] As with the NKG2A and CISH knockout NK cells, Cbl proto-oncogene B (CBLB) knockout (using the guide RNAs shown in Table 5 [SEQ ID NO: 164, 165, 166]) and CISH knockout (using CISH guide RNA 5 [SEQ ID NO: 157]) gene edited NK cells were challenged with Reh tumor cells at a 1:1 and 2:1E:T ratio 5 days after being electroporated with the gene editing machinery. Briefly, parent NK cells were maintained in a low IL-2 media with feeder cells for 7 days, electroporated on day 7, incubated in high IL-2 media on days 7-10, low IL-2 media on days 10-12, then subjected to the Reh tumor challenge assay on day 12 (FIG. 23C). FIG. 23A shows that while mock NK cells exhibited ˜45% cytotoxicity against Reh cells at the 1:1 ratio, each of the CBLB gRNA knockout NK cell groups showed ˜20% greater cytotoxicity, with an average of ˜70% cytotoxicity against Reh cells. For the 2:1 ratio, the corresponding enhanced cytotoxicity is similar to the 1:1 ratio group, with mock NK cells exhibiting ˜60% cytotoxicity, and each of the CBLB knockout NK cell groups showing a ˜20% greater cytotoxicity, with an average of 80% cytotoxicity against Reh cells. The CISH gRNA 5 knockout NK cell group also exhibited similar results, with approximately 65% in the 1:1 ratio and approximately 80% in the 2:1 ratio, consistent with the previous CISH knockout experiment using gRNAs 1 and 2, discussed above. Overall, the increase in cytotoxicity in CBLB knockout NK cells is proportionate with the CISH knockout NK cells. These data shows that CBLB knockout, in accordance with several embodiments disclosed herein, has a positive impact on NK cell cytotoxicity. In several embodiments, combinations of CISH knockout and CBLB knockout are used to further enhance the cytotoxicity of engineered NK cells. In several embodiments, CBLB knockout NK cells exhibit a greater responsiveness to cytokine stimulation, leading, in part to their enhanced cytotoxicity. In several embodiments, the CBLB knockout leads to increased resulting in increased secretion of effector cytokines like IFN-g and TNF-α and upregulation of the activation marker CD69. In several embodiments, knockout of CBLB is employed in conjunction with engineering the NK cells to express a CAR, leading to further enhancement of NK cell cytotoxicity and/or persistence.

[0584] Another E3 ubiquitin ligase, TRipartite Motif-containing protein 29 (TRIM29), is a negative regulator of NK cell functions. TRIM29 is generally not expressed by resting NK cells, but is readily upregulated following activation (in particular by IL-12/IL-18 stimulation). As discussed above, CRISPR/Cas9 was also used to disrupt expression of TRIM29, though in additional embodiments, other gene editing approaches can be used. Non-limiting examples of TRIM29-targeting guide RNAs are shown below in Table 6.

TABLE 6
TRIM29 Guide RNAs

| SEQ ID | | | |
|---|---|---|---|
| NO: | Name | Sequence | Target |
| 167 | TRIM29-1 | GAACGGTAGGTCCCCTCTCGTGG | Exon 4 |
| 168 | TRIM29-2 | AGCTGCCTTGGACGACGGGCAGG | Exon 7 |
| 169 | TRIM29-3 | TGAGCCGTAACTTCATTGAGAGG | Exon 4 |

[0585] TRIM29 knockout (using the gRNAs shown in Table 6 [SEQ ID NO: 167, 167, 169]) gene edited NK cells were challenged with Reh tumor cells at a 1:1 and 2:1E:T ratio 5 days after being electroporated with the gene editing machinery. The timeline and culture parameters were the same as the CBLB knockout example (FIG. 23C). FIG. 23B shows that TRIM29 knockout has a somewhat less robust impact on enhancing cytotoxicity compared to the CISH or CBLB knockouts. Each of the TRIM29 gRNA NK cell groups had cytotoxicity against Reh cells slightly better than mock cells (˜50% vs ˜45% cytotoxicity at the 1:1 ratio and ˜70% vs ˜60% cytotoxicity at the 2:1 ratio). Comparatively, NK cells transfected with the CISH gRNA 5 had improved cytotoxicity relative to both mock and TRIM29 knockout NK cells in both 1:1 and 2:1 ratio. While these results indicate that TRIM29 only had a minor effect or no effect on NK cell cytotoxicity under these conditions, that may be at least in part due to the target cell type (e.g., the pathways altered in response to changes in TRIM29 expression are not as active as, for example those altered by changes in CBLB expression). In addition, in several embodiments, a combination of engineering the NK cells with a CAR construct, for example a CAR targeting CD19 and knocking out TRIM29 expression results in significantly enhanced NK cell cytotoxicity and/or persistence. In several embodiments, knockout of TRIM29 expression upregulates interferon release by NK cells.

[0586] Interleukins, in particular interleukin-15, are important in NK cell function and survival. Suppressor of cytokine signaling (SOCS) proteins are negative regulators of cytokine release by NK cells. The protein tyrosine phosphatase CD45 is an important regulator of NK cell activity through Src-family kinase activity. CD45 expression is involved in ITAM-specific NK-cell functions and processes such as degranulation, cytokine production, and expansion. Thus, knockout of CD45 expression should result in less effective NK cells. As discussed above, CRISPR/Cas9 was used to disrupt expression of CD45 and SOCS2, though in additional embodiments, other gene editing approaches can be used. Non-limiting examples of CD45 and SOCS2-targeting guide RNAs are shown below in Table 7.

TABLE 7
CD45 and SOCS2 Guide RNAs

| SEQ | | | |
|---|---|---|---|
| ID NO: | Name | Sequence | Target |
| 170 | CD45-1 | AGTGCTGGTGTTGGGCGCAC | Exon 25 |
| 171 | SOCS2-1 | GTGAACAGTGCCGTTCCGGGGGG | Exon 3 |
| 172 | SOCS2-2 | GGCACCGGTACATTTGTTAATGG | Exon 3 |
| 173 | SOCS2-3 | TTCGCCAGACGCGCCGCCTGCGG | Exon 2 |

[0587] Suppressor of cytokine signaling 2 (SOCS2) knockout (using the gRNAs showed in Table 7 [SEQ ID NO: 171, 172, 173]) gene edited NK cells were assessed in a time course cytotoxicity assay 7 days after being electroporated with the gene editing machinery. Briefly, parent NK cells were maintained in a low IL-2 media with feeder cells for 7 days, electroporated on day 7, incubated in high IL-2 media for days 7-11, low IL-2 media on days 11-14, then subjected to the Incucyte cytotoxicity assay against Reh cells at a 1:1E:T ratio on day 14 (FIG. 24C). FIG. 23A shows the results of the cytotoxicity assay with NK cells electroporated with a first electroporation system. Using this system, NK cells transfected with each of the SOCS2 gRNAs exhibited cytotoxic activity similar to the CISH gRNA 2 NK cell group (described above). The three gRNA curves for SOCS2 are superimposed in FIG. 24A. CD45 knockout NK cells served as the negative control (as discussed above, CD45 is a positive regulator of NK cell activity, so the CD45 knockout should show reduced cytotoxicity). FIG. 23B shows the results of the cytotoxicity assay with NK cells following the same schedule but electroporated with a second electroporation system. In this case, out of the SOCS2 gRNAs examined, SOCS2 gRNA 1 resulted in an improved cytotoxicity against Reh cells. SOCS2 gRNA 2 and 3 yielded less effective NK cells than with the first electroporation system. SOCS2 gRNA 1 knockout NK cells showed a slight enhancement in cytotoxicity compared to CISH gRNA 2 knockout NK cells. These results indicate that, according to several embodiments, knockout of SOCS2 reduces the negative regulation of NK cells and yield NK cells with enhanced cytotoxicity. In several embodiments, specific gRNAs are used to enhance the cytotoxic NK cells, for example SOCS2 gRNA 1. In several embodiments, knockout of SOCS2 is employed in conjunction with engineering the NK cells to express a CAR, leading to further enhancement of NK cell cytotoxicity and/or persistence.

### Example 2—Approaches for Generating Hypoimmune Therapeutic Cells

[0588] As discussed herein, in several embodiments, a mixed immune cell population is used in therapy. In several embodiments, a mixture of T cells and NK cells are employed, each optionally engineered to express a CAR targeting a tumor marker and/or edited to reduce or alter expression of an endogenous gene. In several embodiments, the editing is required due to overlap with or similarity between an endogenous marker expressed by one, or both (or more if more than two), of the immune cell populations and the cancer marker being targeted with the CAR. In such circumstances, were the editing not performed, fratricide among the therapeutic cells would result. In some embodiments, editing is required even if only one immune cell type is used, as fratricide can occur within a single cell population as well.

[0589] In a mixed cell population, when considered in an autologous context, T cells express MHC-I in complex with a self-peptide, which functions as an inhibitory ligand for NK cell receptors, even though NK cells express both inhibitory and activating receptor. In this context, the MHC-I inhibitory signal overpowers activating signals on NK cells. Thus, using a mixed NK and T cell population from collected from and then delivered to the same donor should be compatible.

[0590] In contrast, in an allogeneic setting, graft versus host rejections can occur between graft and host T cells. In this context, the peptides presented by the host T cells (host “self” peptides) would interact with the graft (engineered) T cell receptor and since the host peptide would be non-self vis-à-vis the graft T cell, the graft T cell would act cytotoxically towards the host T cell. According to some embodiments provided for herein, genetic editing to remove/deplete TCR expression/function in the therapeutic T cell population (graft cells) would prevent their activation by host T cell peptide presentation. Thus, in several embodiments, therapeutic T cells are edited to knockout the TCR (referred to as “TCR^{KO}”) Reversing the perspective, the graft T cells, if un-edited, still present donor peptides on MHCI, which are non-self vis-à-vis the host T cells, which would result in host versus graft effects. However, according to some embodiments disclosed herein, gene editing is performed to remove/deplete B2M expression in therapeutic T cells, which disrupts graft peptide presentation by the therapeutic T cells. Thus, in several embodiments, therapeutic T cells are edited to knockout B2M (referred to as “B2M^{KO}”). A side effect of this B2M knockout, due to the loss of the presentation of self-peptide by the therapeutic T cell, is that the prior inhibitory signal that prevented therapeutic NK cell activity against therapeutic T cells has been removed. Thus, whilst B2M knockout protects therapeutic T cells from host T cells, it also renders them susceptible to therapeutic NK cells. To combat this newly generated susceptibility to therapeutic NK cells, experiments were undertaken to determine if HLA re-expression by therapeutic T cells could confer resistance to the activity of therapeutic NK cells. In several embodiments, HLA-E is re-expressed to protect therapeutic T cells. In several embodiments, HLA-G is re-expressed to protect therapeutic T cells. In several embodiments, HLA-E and G are re-expressed to protect therapeutic T cells. In several embodiments, a disulfilde trap single chain trimer (dtSCT) is used to express HLA-E and/or HLA-G and B2M (see FIG. 29B for a schematic). FIG. 29C shows a schematic of an experimental setup to assess the compatibility of various engineered/edited immune cells in a mixed population. Briefly, T cells are edited according to embodiments disclosed herein to knockout B2M. Those B2M^{KO} cells are split and then further edited to express, via a dtSCT: HLA-G (referred to as “B2M-KO_dtSCTG”), HLA-E (using a 15 amino acid linker to connect the peptide, referred to as “B2M-KO_dtSCTE15”), HLA-E (using a 20 amino acid linker to connect the peptide, referred to as “B2M-KO_dtSCTE20”), or tCD47 (referred to as “B2M-KO_CD47”). Each of those resulting cell groups were then co-cultured with NK cells expressing, as a non-limiting example, an anti-CD19 CAR, in order to assess how the genetic modifications (B2M knockout and expression of various peptides) functioned to establish immune compatibility between the cell types.

[0591] Various NK:T cell ratios were tested, with the resultant data shown in FIGS. 30A-30C. Data are presented as the percentage of B2M^{KO} T cells out of the live T cells present in the co-culture over time. Co-culture was performed for 6 days, with measurements taken at Day 0, 1, 2, and 6. FIG. 30A shows the data for an NK:T cell ratio of 1:4. Unmodified T cells and B2M^{KO} T cells were used as controls. As shown in FIG. 30A, the various genetic modifications and expression of immunosuppressive peptides confers various degrees of compatibility with NK cells, with the expression of HLA-E exhibiting the greatest inhibition of the NK cell-based elimination of B2M^{KO} T cells, and actually allowing a slight expansion of the T cells over time. With a 1:2 NK:T cell ratio (FIG. 30B), there was a greater degree of elimination of B2M^{KO} T cells particularly with HLA-G and tCD47 expression. Notably HLA-E (whether using a 15 or 20 amino acid linker) maintained relatively consistent levels during the co-culture, despite there being present a higher ratio of NK cells in the co-culture. FIG. 30C shows survival data when a 1:1 NK:T cell ratio is used in the co-culture. As with the 1:2 ratio, HLA-E expression conferred the greatest degree of NK and T cell compatibility, with the other constructs showing reduction in T cell numbers over the course of the experiment. FIGS. 31A-31C show corresponding T cell survival data from an additional donor, with these data indicating that there is some degree of donor-specific effect in terms of the ultimate compatibility with the NK cells. For example, these data show that, at a 1:4 NK:T cell ratio, even the cells modified to express HLA-E showed reduced survival over time (FIG. 31A), with the higher ratios (FIGS. 31B and 31C) exhibiting reduced modified T cell numbers at earlier time-points in the co-culture.

[0592] Without wishing to be bound by theory, the mechanism of action of HLA-E conferring “self” identity that is recognized by NK cells (as discussed above) is achieved through a balance of inhibitory and activating receptors on NK cells. NKG2A is the receptor that transduces inhibitory signals, while NKG2C is the receptor that transduces activation signals. Thus, according to several embodiments, the degree of expression of NKG2A and/or NKG2C by NK cells may impact the degree of activity that the NK cells exhibit against T cells (either in the absence of, or even with the re-expression of HLA-E). To evaluate this possibility, cells from two donors (one with HLA-E based protection, FIGS. 30A-30C and one showing reduced HLA-E based protection, FIGS. 31A-31) were evaluated for the degree of NKG2A and B2M expression at various points during the co-culture. FIG. 33A shows data from Day 0 of co-culture at a 1:1 NK:T ratio for the donor showing reduced HLA-E based protection (top row) and the donor showing HLA-E based protection (bottom row). While T cells from both donors exhibited similar levels of B2M expression (˜60% of the cells from each donor were B2M-negative), there were marked differences in NKG2A expression. The donor on the top (non-HLA-E protected) had −24% of the NK cells being NKG2A-positive, with the donor on the bottom (exhibited HLA-based protection) had over 95% of the NK cells expressing NKG2A. FIG. 33A shows data from Day 6 for a 1:4 NK:T ratio with a similar pattern of NKG2A expression exhibited between the two donors. In contrast, however, the degree of B2M^{KO} T cells present at Day 6 was just over 3% in the non-HLA-E protected donor, while the degree of B2M^{KO} T cells present for the HLA-E protected donor was over 70%. FIG. 32C shows corresponding data for a 1:2 ratio and FIG. 32D shows corresponding data for a 1:1 NK:T ratio. Even at the higher ratios (more NK cells for every “target” T cell), the lower degree of NKG2A positivity correlated with a lower degree of B2M^{KO} T cells, and in contrast the greater degree of NKG2A positivity correlated with a greater degree of B2M^{KO} T cells surviving. Given that NKG2A moderates the inhibitory effects of HLA-E, donors expressing greater NKG2A levels may, according to some embodiments, showed reduced fratricide of T cells modified to re-express HLA-E in a mixed NK/T population of therapeutic cells.

[0593] To further investigate the mechanism by which T cells can be protected from cytotoxic effects of NK cells in a mixed therapeutic cell culture, NK cells and T cells from a single donor were collected and phenotypically characterized. FIG. 34 shows the resultant characteristics of NK cells when untransduced (top row) and when engineered to express, as a non-limiting embodiment of CAR, an anti-CD19 CAR (bottom row). These data show that the cell populations are significantly pure NK cells (based on CD56 positivity) and express not only high CAR percentages for the experimental population, but also nearly 80% of the cells are NKG2A positive. FIG. 35 shows corresponding characterization for the T cells. Each of the three groups of T cells were engineered to express an ani-CD19 CAR, and again, were substantially pure populations of T cells (based on CD3/CD56 negativity or CD4/CD8 positivity). Over 80% of the population expressed the CD19 CAR and efficiency of TCR knockout was 99% or more. The first experimental group was not edited to knockout B2M while groups 2 and three showed 88% efficient B2M knockout. The last experimental group was engineered to re-express HLA-E, with about 45% for the cells being HLA-E positive. The experimental groups were designed to aid in determining whether B2M-deficient T cells (including HLA-E re-expressing cells) expressing an anti-tumor CAR are compatible with untransduced NK cells and also whether, in the context of an NK/T mixed therapeutic population, whether T cells (including HLA-E re-expressing cells) expressing an anti-tumor CAR are compatible with NK cells also expressing an anti-tumor CAR (optionally to a different tumor target).

[0594] FIGS. 36A-36F show data from coculture of NK cells (unmodified) with T cells expressing an anti-CD19 CAR and that are either TCR/B2M knockout (“TX19.TCR^{K}O.B2M^{K}O”) or TCR/B2M with HLA-E re-expressed (“TX19. TCR^{KO}.B2M^{KO}.dtSCTE”). NK:T cell ratios are (A-F, respectively) 0:1, 1:4, 1:2, 1:1, 2:1, and 4:1. Co-culturing was performed for 14 days and the percentage of B2M^{KO} T cells (out of live T cells) present in the culture was assessed at the indicated timepoints with HLA-E re-expressing data points indicated by the inverted triangles. FIG. 36A shows positive control data, as this represents the culture of the indicated T cells without any NK cells present. FIG. 36B shows the data with the lowest NK:T ratio. As with the prior data for an HLA-E protected donor (expressing relatively high NKG2A), the T cell population was relative stable though 7 days of co-culture. Between 7 and 14 days, the percentage of B2M^{KO} T cells was reduced in both groups, though those cells with re-expressed HLA-E made up nearly 40% of the remaining population of T cells, while those without HLA-E re-expression dropped to nearly zero. A dashed circle surrounds these two data points, which are indicative of HLA-E based protection of the T cells from cytotoxic effects of the NK cells. A similar pattern was seen in the 1:2 NK:T ratio shown in FIG. 36C. As the ratio of NK:T cells increased (FIG. 36C-36F), the basic pattern of T cell survival over the course of the experiment was relatively maintained, though the survival numbers at the final time point for the HLA-E re-expressing group was serially modestly reduced. However, these data indicate that, even at relatively high NK:T ratios (up to at least 4:1), the re-expression of HLA-E on T cells confers a protective effect on those T cells vis-à-vis NK cells, as compared to those T cells without HLA-E re-expression.

[0595] Turning to the question of whether HLA-E can confer protection on T cells vis-à-vis NK cells that are also engineered to express a CAR (e.g., representing the context of a mixed cell therapeutic), FIGS. 36G-36L provide corresponding data for coculture of NK cells expressing an anti-CD19 CAR (NKX19) with T cells expressing an anti-CD19 CAR and that are either TX19.TCR^{KO}.B2M^{KO} or TX19. TCR^{KO}.B2M^{KO}.dtSCTE. NK:T cell ratios are (G-L, respectively) 0:1, 1:4, 1:2, 1:1, 2:1, and 4:1. Co-culturing was performed for 14 days and the percentage of B2M^{KO} T cells (out of live T cells) present in the culture was assessed at the indicated timepoints with HLA-E re-expressing data points indicated by the inverted triangles. FIG. 36G shows positive control data, as this represents the culture of the indicated T cells without any engineered NK cells present. FIGS. 361-36L represent the move from lowest to highest NK:T cell ratio, and while the percentage of B2M^{KO} T cells appeared to be less when cultured with NKX19 NK cells, there appears to be a maintained protection of HLA-E re-expressing T cells at equivalent ratios of NK:T or lower. The data at high NK:T ratio suggest there may still be some protection with the greater degree of NK cells, but the protective effect appears to be somewhat abrogated. FIGS. 37A-37F show corresponding data (NKX19:TX19), at various similar timepoints, for an additional donor. FIGS. 38A-38F show corresponding data (NKX19:TX19), at various similar timepoints, for an additional donor. FIGS. 39A-39F show corresponding data (NKX19:TX19) for an additional donor. FIGS. 40A-40F show corresponding data (NKX19:TX19), at various similar timepoints, for an additional donor, with the inclusion of the TCR^{KO} T cells as a control. FIGS. 41A-41F show corresponding data (NKX19:TX19), at various similar timepoints, for an additional donor, with the inclusion of the TCR^{KO} T cells as a control. While there is some donor variability in terms of the protection conferred on the T cells by HLA-E re-expression, the general trend is that HLA-E re-expression results in a clear protective effect at early time points in co-culture, particularly at low NK:T ratios, the protective effect becomes reduced as the number of NK cells outnumbers the number of T cells. Nevertheless, these data demonstrate better survival of the HLA-E re-expressing T cells at ratios of ˜1:1 or lower. According to some embodiment, a 1:1 NK:T cell ratio (or lower) is used in a dosing preparation for a mixed cell therapeutic product. According to additional embodiments, a 1:2, 1:3, 1:4, 1:5, or lower (including ratios between those listed) is used in a dosing preparation for a mixed cell therapeutic product. Additionally, as disclosed herein, additional edits to, or engineering of, T cells (or NK cells) are provided for to reduce the fratricide between different cell types in a mixed therapeutic cell context.

### Example 3—Additional Immune Evasion Constructs and Uses Thereof

[0596] As discussed herein, various immunosuppressive constructs are provided for in order to confer on, for example an NK or a T cell in a mixed NK and T cell therapeutic population, reduced immunogenicity vis-à-vis the other therapeutic cells, as we as vis-à-vis host T cells. In several embodiments, the immunosuppressive constructs and resulting engineered (and/or edited) cells are less fratricide from another member of the therapeutic cell population, and also reduce risk of graft versus host and host versus graft side effects. FIGS. 42A and 42B (and FIG. 29C) and FIG. 43 show non-limiting schematics of how an immunosuppressive construct according to embodiments provided for herein might be constructed. Table 8 shows the corresponding SEQ ID NO: for certain non-limiting immunosuppressive constructs provided for herein.

TABLE 8
Selected Immunosuppressive Constructs Sequence Identifiers

| SEQ | |
|---|---|
| ID | |
| NO | Construct Identifier |
| 683 | UL18 trimer_SS VMAPRTLFL_IRES_GFP |
| 684 | UL18 trimer_SS VMAPRTLFL_IRES_GFP |
| 685 | UL18 trimer_SS VMAPRTLFL - AA [no Flag or GFP] |
| 686 | UL18 trimer_SS VMAPRTLFL - NT [no Flag or GFP] |
| 687 | HLA-E trimer_SS VMAPRTLFL_IRES_GFP |
| 688 | HLA-E trimer_SS VMAPRTLFL |
| 689 | HLA-E trimer_SS VMAPRTLFL - AA - [no flag or gfp] |
| 690 | HLA-E trimer_SS VMAPRTLFL [no flag or gfp] |
| 691 | CKS17-8aHTM_aa |
| 692 | CKS17-8aHTM |
| 693 | CKS17-8aHTM_aa [no flag or gfp] |
| 694 | CKS17-8aHTM [no flag or gfp] |
| 695 | p15E-L-8aHTM_IRES_GFP |
| 696 | p15E-L-8aHTM_IRES_GFP |
| 697 | p15E-L-8aHTM [no flag/gfp] |
| 698 | p15E-L-8aHTM_[no flag/gfp |
| 699 | HTLV-8aHTM_IRES_GFP |
| 700 | HTLV-8aHTM_IRES_GFP |
| 701 | HTLV-8aHTM_[no flag/gfp] |
| 702 | HTLV-8aHTM_[no flag/gfp] |
| 703 | HIV_L-8aHTM_IRES_GFP |
| 704 | HIV_L-8aHTM_IRES_GFP |
| 705 | HIV_L-8aHTM_[no flag/gfp] |
| 706 | HIV_L-8aHTM_[no flag/gfp] |
| 707 | HIV_S-8aHTM_IRES_GFP |
| 708 | HIV_S-8aHTM_IRES_GFP |
| 709 | HIV_S-8aHTM_no flag/gfp |
| 710 | HIV_S-8aHTM_no flga/gfp |
| 711 | TCR Synthetic 3x-8aHTM_IRES_GFP |
| 712 | TCR Synthetic 3x-8aHTM_IRES_GFP |
| 713 | TCR Synthetic 3x-8aHTM_no flag/gfp |
| 714 | TCR Synthetic 3x-8aHTM_no flag/gfp |
| 715 | tCD47-8aHTM_IRES_GFP |
| 716 | tCD47-8aHTM_IRES_GFP |
| 717 | tCD47-8aHTM_no flag/gfp |
| 718 | tCD47-8aHTM_no falg/gfp |
| 719 | p15Ex3-8aHTM_IRES_GFP |
| 720 | p15Ex3-8aHTM_IRES_GFP |
| 721 | p15Ex3-8aHTM_no flag/gfp |
| 722 | p15Ex3-8aHTM_no flag/gfp |
| 723 | p15E_tCD47-8aHTM_IRES_GFP |
| 724 | p15E_tCD47-8aHTM_IRES_GFP |
| 725 | p15E_tCD47-8aHTM_no flag/gfp |
| 726 | p15E_tCD47-8aHTM_no flag/gfp |
| 727 | tCD47_p15E-8aHTM_IRES_GFP |
| 728 | tCD47_p15E-8aHTM_IRES_GFP |
| 729 | tCD47_p15E-8aHTM_no flag gfp |
| 730 | tCD47_p15E-8aHTM_no flag/gfp |
| 731 | HIV_L_tCD47-8aHTM_IRES_GFP |
| 732 | HIV_L_tCD47-8aHTM_IRES_GFP |
| 733 | HIV_L_tCD47-8aHTM_no flag/gfp |
| 734 | HIV_L_tCD47-8aHTM_no flag/gfp |
| 735 | HIV_S_tCD47-8aHTM_IRES_GFP |
| 736 | HIV_S_tCD47-8aHTM_IRES_GFP |
| 737 | HIV_S_tCD47-8aHTM_no flag/gfp |
| 738 | HIV_S_tCD47-8aHTM_no flag/gfp |
| 739 | HTLV_tCD47-8aHTM_IRES_GFP |
| 740 | HTLV_tCD47-8aHTM_IRES_GFP |
| 741 | HTLV_tCD47-8aHTM_no flag/gfp |
| 742 | HTLV_tCD47-8aHTM_no flag/gfp |
| 743 | tCD47_p15Ex2-8aHTM_IRES_GFP |
| 744 | tCD47_p15Ex2-8aHTM_IRES_GFP |
| 745 | tCD47_p15Ex2-8aHTM_noflag/gfp |
| 746 | tCD47_p15Ex2-8aHTM_no flag/gfp |
| 747 | CKS17-8aHTM_eGFP_aa |
| 748 | CKS17-8aHTM_eGFP |
| 749 | CKS17-8aHTM_aa_noGFP |
| 750 | CKS17-8aHTM_NT_no GFP |
| 751 | CD47-eGFP_aa |
| 752 | CD47-eGFP |
| 753 | CD47-_ aa_no_GGFP |
| 754 | CD47-NT_no_GFP |
| 755 | fGP41_HIVtm_sfGFP_aa |
| 756 | fGP41_HIVtm_sfGFP |
| 757 | fGP41_HIVtm_aa_no_GFP |
| 758 | fGP41_HIVtm_NT_no_GFP |
| 759 | p15Etm_sfGFP_aa |
| 760 | p15Etm_sfGFP |
| 761 | p15Etm_aa_no_GFP |
| 762 | p15Etm_NT_noGFP |
| 763 | CD43_TM_sfGFP_aa |
| 764 | CD43_TM_sfGFP |
| 765 | CD43_TM_aa_No_GFP |
| 766 | CD43_TM_NT_no_GFP |
| 767 | LMP1_TM-sfGFP_aa |
| 768 | LMP1_TM-sfGFP |
| 769 | LMP1_TM_aa_no_GFP |
| 770 | LMP1_TM-NT_No-GFP |
| 771 | fgD_TM_sfGFP_aa |
| 772 | fgD_TM_sfGFP |
| 773 | fgD_TM_AA-NO_GFP |
| 774 | fgD_TM_NT_NO_GFP |
| 775 | fLLT1_TM-sfGFP_aa |
| 776 | fLLT1_TM-sfGFP |
| 777 | fLLT1_TM-_aa_No_GFP |
| 778 | fLLT1_TM-NT_No_GFP |
| 779 | CD47tm162_sfGFP_aa |
| 780 | CD47tm162_sfGFP |
| 781 | CD47tm162_aa_No_GFP |
| 782 | CD47tm162_NT_NoGFP |
| 783 | LMP_L-CD8HTM_sfGFP_aa |
| 784 | LMP_L-CD8HTM_sfGFP |
| 785 | LMP_L-CD8HTM_aa_No_GFP |
| 786 | LMP_L-CD8HTM_NT_No_GFP |
| 787 | LALLFWLx5-CD8HTM_sfGFP_aa |
| 788 | LALLFWLx5-CD8HTM_sfGFP |
| 789 | LALLFWLx5-CD8HTM_aa_no_GFP |
| 790 | LALLFWLx5-CD8HTM_NT_No_GFP |
| 791 | GP41fptm_sfGFP_aa |
| 792 | GP41fptm_sfGFP |
| 793 | GP41fptm_aa_No-GFP |
| 794 | GP41fptm_NT_No_GFP |
| 795 | CKS17-8aTM_sfGFP_aa |
| 796 | CKS17-8aTM_sfGFP |
| 797 | CKS17-8aTM_aa_No_GFP |
| 798 | CKS17-8aTM_NT_No_GFP |
| 799 | CKS_HTLV-8aTM_sfGFP_aa |
| 800 | CKS_HTLV-8aTM_NT_No_GFP |
| 801 | CKS_HTLV-8aTM_aa_No_GFP |
| 802 | CKS_HTLV-8aTM_sfGFP |
| 803 | CKS_LMP-8aTM_sfGFP_aa |
| 804 | CKS_LMP-8aTM_sfGFP |
| 805 | CKS_LMP-8aTM_aa_no_GFP |
| 806 | CKS_LMP-8aTM_NT_No_GFP |
| 807 | CKS_GP41fptm_sfGFP_aa |
| 808 | CKS_GP41fptm_sfGFP |
| 809 | CKS_GP41fptm_aa_No_GFP |
| 810 | CKS_GP41fptm_NT_No_GFP |
| 811 | LMP_S-CD8HTM_sfGFP_aa |
| 812 | LMP_S-CD8HTM_sfGFP |
| 813 | LMP_S-CD8HTM_aa_No_GFP |
| 814 | LMP_S-CD8HTM_NT_No_GFP |
| 815 | LMP_CD47tm162_sfGFP_aa |
| 816 | LMP_CD47tm162_sfGFP |
| 817 | LMP_CD47tm162_aa_No_GFP |
| 818 | LMP_CD47tm162_NT_No_GFP |
| 819 | p15E_CD47tm162_sfGFP_aa |
| 820 | p15E_CD47tm162_sfGFP |
| 821 | p15E_CD47tm162_aa_No_GFP |
| 822 | p15E_CD47tm162_NT_No_GFP |
| 823 | CD47_GP41fptm_sfGFP_aa |
| 824 | CD47_GP41fptm_sfGFP |
| 825 | CD47_GP41fptm_aa_No_GFP |
| 826 | CD47_GP41fptm_NT_No_GFP |
| 827 | HLA-E_STE20_sfGFP_aa |
| 828 | HLA-E_STE20_sfGFP |
| 829 | HLA-E_STE20_aa_NO_GFP |
| 830 | HLA-E_STE20_NT_NO_GFP |
| 831 | anti-SIRPa agonist_vHL_sfGFP_aa |
| 832 | anti-SIRPa agonist_vHL_sfGFP |
| 833 | anti-SIRPa agonist_vHL_aa_NO_GFP |
| 834 | anti-SIRPa agonist_vHL_NT_NO_GFP |
| 835 | HTLV1_fGP62_sfGFP_aa |
| 836 | HTLV1_fGP62_sfGFP |
| 837 | HTLV1_fGP62_aa_NO_GFP |
| 838 | HTLV1_fGP62_NO_GFP |
| 839 | HTLV1_GP21_sfGFP_aa |
| 840 | HTLV1_GP21_sfGFP |
| 841 | HTLV1_GP21_aa_NO_GFP |
| 842 | HTLV1_GP21_NO_GFP |
| 843 | LASV_fGP2_sfGFP_aa |
| 844 | LASV_fGP2_sfGFP |
| 845 | LASV_fGP2_aa_NO_GFP - |
| 846 | LASV_fGP2_NT_NO_GFP |
| 847 | SEBOV_fGP_sfGFP_aa |
| 848 | SEBOV_fGP_sfGFP |
| 849 | SEBOV_fGP_aa_NO_GFP |
| 850 | SEBOV_fGP_NT_NO_GFP |
| 851 | SEBOV_GP2_sfGFP_aa |
| 852 | SEBOV_GP2_sfGFP |
| 853 | SEBOV_GP2_aa_NO_GFP |
| 854 | SEBOV_GP2_NT_NO_GFP |
| 855 | SCoV_S2_sfGFP_aa |
| 856 | SCoV_S2_sfGFP |
| 857 | SCoV_S2_aa_NO_GFP |
| 858 | SCoV_S2_NT_NO_GFP |
| 859 | LGALS3BP_sfGFP_aa |
| 860 | LGALS3BP_sfGFP |
| 861 | LGALS3BP_aa_NO_GFP |
| 862 | LGALS3BP_NT_No_GFP |
| 863 | CD24_sfGFP_aa |
| 864 | CD24_sfGFP |
| 865 | CD24_aa_NO_GFP |
| 866 | CD24_NT_NO_GFP |
| 867 | HCV_E2_sfGFP_aa |
| 868 | HCV_E2_sfGFP |
| 869 | HCV_E2_aa_NO_GFP |
| 870 | HCV_E2_NT_NO_GFP |
| 871 | anti-SIRPa agonist_vLH_sfGFP_aa |
| 872 | anti-SIRPa agonist_vLH_sfGFP |
| 873 | anti-SIRPa agonist_vLH_aa_NO_GFP |
| 874 | anti-SIRPa agonist_vLH_NT_NO_GFP |
| 875 | CEACAM1_sfGFP_aa |
| 876 | CEACAM1_sfGFP |
| 877 | CEACAM1_aa_NO_GFP |
| 878 | CEACAM1_NT_NO_GFP |
| 879 | CD155tm_3M_sfGFP_aa |
| 880 | CD155tm_3M_sfGFP |
| 881 | CD155tm_3M_aa_NO_GFP |
| 882 | CD155tm_3M_NT_NO_GFP |
| 883 | CD31tm_sfGFP_aa |
| 884 | CD31tm_sfGFP |
| 885 | CD31tm_aa_NO_GFP |
| 886 | CD31tm_NT_NO_GFP |
| 887 | CD111tm_sfGFP_aa |
| 888 | CD111tm_sfGFP |
| 889 | CD111tm_aa_NO_GFP |
| 890 | CD111tm_NT_NO_GFP |
| 891 | CD200tm_sfGFP_aa |
| 892 | CD200tm_sfGFP |
| 893 | CD200tm_aa_NO_GFP |
| 894 | CD200tm_NO_GFP |
| 895 | CD8a signal peptide AA |
| 896 | CD8a signal peptide NT |

[0597] As discussed above, re-expression of HLA-E or HLA-G on a therapeutic cell should impart to the cell the ability to immunosuppress cytotoxicity from co-administered therapeutic cells (as well as host T cells). FIG. 43 shows a schematic process flow for testing the immunosuppressive effects of HLA re-expression. In brief, K562 cells expressing nuclear red dye (K562NR) are prepared as are various hypoimmune constructs as provided for herein. While these test constructs are engineered to include GFP (or a FLAG tag), it shall be appreciated that any of the immunosuppressive constructs provided herein can also be made without a tag. The immunosuppressive constructs are packaged in a retroviral vector and used to transduce the K562NR cells such that at least a portion of the K562 cells express the immunosuppressive construct and GFP (yielding a K562NR Hypo GFP population). Additional K562NR cells are added to the cells to achieve a 1:1 ratio of K562 cells that express (or do not express) a hypoimmune construct (K562 50% GFP). These are now considered the target cells in an assay. Thereafter, activated NK cells are co-cultured with the K562 50% GFP target cells at a 1:1 ratio, and the cytotoxic effects of the NK cells against the K562 50% GFP target cells is assessed.

[0598] FIG. 44 shows the results of one experiment testing multiple immunosuppressive constructs and their ability to protect against cytotoxicity from NK cells. K562NR cells alone showed an increase in red object count (representing number of cells in culture) as a control. As can be seen, many of the immunosuppressive constructs tested did not confer protection against the NK cells. A notable exception is the immunosuppressive HLA-E construct that comprises a trimer of HLA-E peptides. FIG. 45A shows an additional experimental replicate evaluating the protective effects of the immunosuppressive constructs against NK cells from other donors. In FIG. 45A, there was some modest immunoprotective effect for several constructs, but again, the HLA-E trimer construct offered the most protective effects. In FIG. 45B, none of the constructs provided any protection against activated NK cells from a different donor. FIG. 45C shows the protective effect of the HLA-E trimer construct, even against immortalized NK92 cells. As discussed above, the mechanism of action of HLA-E inhibition of NK cell activation is through the balance of the inhibitory and activating receptors on an NK cell, with NKG2A producing NK cell inhibitory signals upon binding to HLA. FIG. 46 shows that level of HLA expression by donor. As can be seen, donor #784 and donor #0317 both have NK cells that express high levels of NKG2A, over 85% of the NK cells are NKG2A positive for each donor. These donors correspond to those experimental results of FIG. 44 and FIG. 45A, where the re-expression of HLA-E through the use of the HLA-E trimer immunosuppressive construct conferred protection of the K562 “target” cells from the donor cells. These data suggest that, according to some embodiments, donor NK cells that express elevated levels of NKG2A (e.g., above about 60%, about 70%, about 80% about 85% about 90% or more) are unexpectedly useful in a mixed therapeutic cell population wherein at least a portion of the therapeutic cells are engineered to express an immunosuppressive construct, as the high-NKG2A cells are inhibited from fratricide against other therapeutic cells.

### Example 4—Cytotoxic Evaluation of Selected Hypoimmune Constructs

[0599] As discussed herein, various immunosuppressive constructs are provided for in order to confer on, for example an NK or a T cell in a mixed NK and T cell therapeutic population, reduced immunogenicity vis-à-vis the other therapeutic cells, as we as vis-à-vis host T cells. Several experiments were run to assess the ability of selected hypoimmune constructs provided for herein to confer characteristics of immune evasion on cells to express the constructs.

[0600] FIG. 47A shows a schematic process flow for testing the immunosuppressive effects of HLA re-expression that is a modification of that shown in FIG. 43. In brief, K562 cells expressing nuclear red dye (K562NR) are prepared as are various hypoimmune constructs as provided for herein. While these test constructs are engineered to include GFP (or a FLAG tag), it shall be appreciated that any of the immunosuppressive constructs provided herein can also be made without a tag. The immunosuppressive constructs are packaged in a retroviral vector and used to transduce the K562NR cells such that at least a portion of the K562 cells express the immunosuppressive construct and GFP (yielding a K562NR Hypo GFP population). These cells are then sorted such that 100% of the cells are NR/GFP positive, meaning that all cells express a hypoimmune construct. As discussed above, these are now considered the target cells in an assay. Thereafter, activated NK cells are co-cultured with the K562NR target cells at a 1:1 ratio, and the cytotoxic effects of the NK cells against the K562 NR target cells is assessed.

[0601] FIG. 47B shows cytotoxicity traces resulting from co-culture of the “target” K562 cells that have been modified to express the indicated immune evasion constructs with activated NK cells from a first donor. The top trace (K562NR, K562 modified to express nuclear red, but not expressing any GFP-tagged immune evasion construct) were cultured alone (no activated donor NK cells) and thus represent a positive control (maximal “target” cell growth), As a result, the closer a given experimental cytotoxicity trace is to that positive control, the greater degree of immune evasion was imparted to the target K562 cells. As shown in FIG. 47B, the HLA-E trimer conferred the greater degree of immune evasion to the K562 cells. This was followed by the GP41-fptm constructs. The D155tm-3M, LKAGLS3SBP-8aTM, CD43_tm and CD47 constructs all performed relatively similarly. The data in FIG. 47C relate to the level of expression of the indicated immune evasion constructs by the K562 cells (histogram bars represent the MFI of NR+/GFP+ cells) as well as their relative cytotoxicity ranking (e.g., 1-6). K562NR cells do not express an immune evasion construct, therefore express no GFP, and have relatively low MFl. In this experiment, the HLA-E trimer was expressed most robustly by the K562 cells and was also the most immune protective for the K562 cells against the cytotoxic effects of the activated donor NK cells. Interestingly, the next best performer in terms of immune protection, the GP41-fptm construct, was expressed at the lowest level by the K562 cells.

[0602] Similar cytotoxicity and expression data when activated NK cells from a second donor are provided in FIGS. 47D-47E. As with the data in FIG. 47B, the HLA-E trimer conferred the greatest degree of immune protection to the target K562 cells, with the other immune evasion constructs performing relatively similarly. FIG. 47E reveals again that the HLA-E construct was most robustly expressed and also conferred the most immune protection. Again, the GP41_fptm construct was not highly expressed, but was the second best at conferring immune protection the target K562 cells. FIG. 47F shows additional data when immune evasion construct-modified K562 cells were challenged with activated NK cells from a third donor. Interestingly, the constructs conferred varied amounts of immune protection as compared to challenge with cells from the other two donors. There was not a clear leader in terms of avoiding cytotoxicity, despite (see FIG. 47G) expression of HLA-E trimer remaining the most robust. Notably, the GP41-fptm construct retained its position at the second best at conferring immune evasion.

[0603] FIGS. 47H-47I show similar data for additional immune evasion constructs. FIG. 47H shows the degree of immune protection conferred by the various constructs and FIG. 47I shows the corresponding expression data. FIGS. 47J-47K show data for additional immune evasion constructs. FIG. 47J shows the degree of immune protection conferred by the various constructs and FIG. 47K shows the corresponding expression data. FIGS. 47L-47M show similar data for additional immune evasion constructs. FIG. 47L shows the degree of immune protection conferred by the various constructs and FIG. 47M shows the corresponding expression data. FIGS. 47N-47O show similar data for additional immune evasion constructs. FIG. 47N shows the degree of immune protection conferred by the various constructs and FIG. 47O shows the corresponding expression data. FIG. 47P shows a summary of data ranking various immune evasion constructs. The data from FIGS. 47H-47O are the screening data that led to the testing of the lead ranking constructs (data in 47A-47G). FIGS. 47Q and 47R show a large-scale comparison of the immune protection conferred on K562 cells expressing the indicated constructs (47Q) and the expression levels of the constructs (47R).

[0604] FIG. 48A shows additional data related to the indicated immune constructs and their ability to confer protection on K562 cells. This experiment used activated NK cells from the same donor as used to generate the data in FIG. 47D. As shown in FIG. 48A, the HLA-E trimer conferred the most protection on the target K562NR cells followed by the SEBOV-GP2 construct, HLA-E_STE20 and CD47. The other constructs did confer some degree of protection on the K562 target cells, but in lower proportions. FIG. 48B shows the rank order of the constructs (most to least effective top to bottom) as well as their degree of expression by the K562 cells. As seen with data discussed above, the HLA-E trimer was robustly expressed and, while it conferred the most protection to the K562 cells, other constructs provided significant protection, despite being expressed at lower levels.

[0605] FIGS. 49A-49C show data related to the relative expression of certain constructs and the related immune protection that is conferred on cells expression the constructs. As with the approach above, K562NR cells were engineered to express a selected construct at either a relatively high abundance or a relatively low abundance. FIG. 49A shows data for HLA-E. As indicated in the summary table, the high-HLA-E expressing K562NR cells had approximately twice the expression of the HLA-E construct. As reflected in the curves, the high expressing K562 cells enjoyed a greater degree of immune protection from activated donor NK cells. A similar pattern is shown in FIG. 49B for CD47 expression and also in FIG. 49C for the CD43_TM construct. Thus, while the data from FIGS. 47 and 48 demonstrate that across constructs, expression levels may not correlate with the immune protection, FIG. 49 confirms that within a construct, an increase in the expression of a given construct does appear to correlate with immune protection. Thus, according to some embodiments, therapeutic cells are subjected to one or more steps to enhance expression of one or more immune evasion constructs (e.g., infection with a larger vector dose, re-exposure to vector to increase the immune construct payload, enriching a cell population for those with enhanced expression prior to treatment).

[0606] Taken together, these data taken together suggest that certain of the immune evasion constructs may act through distinct mechanisms of action that are more, or less, effective depending on the context. These include, but are not limited to, variations in expression, activity, blocking binding of NK cells, and the like. These data also suggest that certain constructs exhibit robust expression and, generally, robust immune evasion, while others express relatively poorly but exhibit efficient immune evasion. Thus, in several embodiments, modifications of the immune evasion constructs to improve expression by human cells (e.g., codon optimization) coordinately improves the immune protection conferred. Likewise, these data suggest that there may be donor to donor variability that cause engineered NK cells (e.g., those engineered to express a CAR) to respond differently to activating/inhibitory receptor signals on target cells that alter the cytotoxicity of the engineered cells. Thus, in several embodiments, a particular donor cell profile (e.g., donor NK or T cell phenotype) may be preferred for use in an allogeneic cell therapy context. More information on an advantageous donor cell profile can be found in U.S. Provisional Patent Application Nos. 63/203,703 and 63/262,544, filed Jul. 28, 2021 and Oct. 14, 2021 (respectively), the entire contents of each of which is incorporated by reference herein. As provided for herein, an overall immune evasion strategy can employ one or more approaches to confer protection on immune cells, such as HLA-E expression modifications, expression of one or more viral immunosuppressive peptide, disruption of TCR activation, and/or use of inhibitory ligands. For example, in some embodiments, the one or more approaches to confer protection on immune cells may involve expression and/or modulation of HLA-E, HLA-E trimer, HLA-E STE20, SEBOV-GP2, CD47, LMP, LGAL3S, SIRPa (vH or vL), HTLV1, or SCOV. In several embodiments, the overall approach allows for a more effective allogeneic cell therapeutic regimen.

### Example 5—Further Gene Editing of Immune Cells to Alter Cell Function

[0607] As provided for herein, gene editing (e.g., using a Crispr/Cas system) is used to enhance the functionality (e.g., persistence, cytotoxicity, and/or other characteristics) of immune cells, such as NK cells and/or T cells. Edits may be made at a single gene to reduce, substantially reduce, or eliminate expression and/or function of the protein encoded by the gene. Additionally, edits may be made at multiple gene targets (e.g., two, three, four, or more targets) to reduce, substantially reduce, or eliminate expression and/or function of the protein encoded by each of the genes edited, with the lack of expression or function of the multiple proteins imparting to the edited cells an unexpectedly effective phenotype, either in terms of persistence, degree of cytotoxic signaling (either amount and/or duration), resistance to tumor microenvironment suppressive effects, or other beneficial characteristics.

[0608] For example, as discussed herein, in several embodiments, gene edits are made at a target site in a CISH gene and a target site in a CBLB gene. In some embodiments, a double edit, e.g., CISH/CBLB is made in NK cells and/or T cells for use in therapy. In several embodiments, a combination CISH/CBLB gene edit is made in an NK cell that does not include an additional edit. In several embodiments, a combination CISH/CBLB gene edit is made in an NK cell that does not express any one or combination of any of an anti-CD70 CAR, an anti-CD19 CAR, or an anti-NKG2D chimeric receptor, but are optionally engineered to express a CAR targeting another tumor target.

[0609] For example, as discussed herein, in several embodiments, gene edits are made at a target site in a CISH gene and a target site in a TGFBR2 gene. In some embodiments, a double edit, e.g., CISH/TGFBR2 is made in NK cells and/or T cells for use in therapy. In several embodiments, a combination CISH/TGFBR2 gene edit is made in an NK cell that does not include an additional edit. In several embodiments, a combination CISH/TGFBR2 gene edit is made in an NK cell that does not express any one or combination of any of an anti-CD70 CAR, an anti-CD19 CAR, or an anti-NKG2D chimeric receptor, but are optionally engineered to express a CAR targeting another tumor target.

[0610] For example, as discussed herein, in several embodiments, gene edits are made at a target site in a CISH gene and a target site in a TIGIT gene. In some embodiments, a double edit, e.g., CISH/TIGIT made in NK cells and/or T cells for use in therapy. In several embodiments, a combination CISH/TIGIT gene edit is made in an NK cell that does not include an additional edit. In several embodiments, a combination CISH/TIGIT gene edit is made in an NK cell that does not express any one or combination of any of an anti-CD70 CAR, an anti-CD19 CAR, or an anti-NKG2D chimeric receptor, but are optionally engineered to express a CAR targeting another tumor target.

[0611] As discussed above, CRISPR/Cas9 was used to specifically target and reduce the expression of selected gene and gene combinations in NK cells and an evaluation of the resultant cytotoxicity of the edited cells was performed.

[0612] FIG. 50A shows cytotoxicity data for NK cells edited at selected gene target or targets and co-cultured with 786-O renal cell carcinoma cells. It shall be appreciated that, while 786-O cells express a prevalent amount of CD70 and therefore certain experiments discussed herein relate to edited cells expressing a non-limiting example of an anti-tumor CAR (here an anti-CD70 CAR), the use of the CD70 CAR (and any associated edits to CD70 expression which are made to avoid/reduce fratricide) are specific to these experiments, and the edited cells provided for herein may also be engineered to target tumor markers other than CD70. The data in FIG. 50A were collected 14 days after the indicated gene edits were made and using an effector:target (E:T ratio of 1:2). As shown in FIG. 50A, edits to were made to the CD70 gene for all groups. Edits to CBLB alone, or CBLB and CISH together did not appear to enhance the cytotoxicity of the NK cells in this particular experiment. However, as shown in FIG. 50B, in which the co-culture with target 786-O cells was performed in the presence of TGFb (a known cytokine released into the TME to suppress immune cell activity against tumors) the combination of a CISH/CBLB edit made a marked difference in the cytotoxicity of those cells, improving their cytotoxicity as compared to CBLB edits alone, and rendering them equally as effective as CISH-edited cells. This data shows that the dual edit of CISH/CBLB confers the dual-edited cells with resistance to certain suppressive effectors in the TME, which enhances their cytotoxicity profile. FIG. 50C shows similar data for cells for another donor edited at the indicated gene or genes and evaluated against 786-O cells at 21 days post-editing. As shown, each of a CISH edit, a CBLB edit and a combination CISH/CBLB edit resulted in significant cytotoxicity against the tumor cells, even at a 1:4E:T. FIG. 50D shows additional striking data in the presence of TGFb, in which the single edits to either CISH or CBLB resulted in reduce control of tumor cell growth, but the dual CISH/CBLB edit allowed the donor NK cells to maintain robust cytotoxic effects against the target cells. This data shows that, in several embodiments, a dual edit to CISH/CBLB imparts significant improvements in immune cell function against a target tumor. In several embodiments, the edits are in NK cells, while such dual edits (or triple edits, or more) are possible in T cells as well.

[0613] FIG. 51A shows data with respect to donor NK cells edits at CISH, TGFBR2 or at CISH/TGFBR2 in combination and evaluated for cytotoxicity against target 786-O cells (again with the use of the CD70 CAR and CD70 edit being specific to this experimental setup) 14-days post-editing. The data show that the combination CISH/TGFBR2 edit yields NK cells that have a much more robust cytotoxicity profile than cells edited as CISH or TGFBR2. FIG. 51B shows similar data, but in the presence of TGFb. In this experiment, the TGFb appears to successfully suppress the effects of each of the edited cell types, reflecting its suppressive power in the TME. FIG. 51C shows related data, collected at 21 days post-edit and with a co-culture of the edited NK cells with ACHN target cells at a 1:4E:T ratio. It shall be appreciated that, while ACHN cells also express a prevalent amount of CD70 and therefore certain aspects of these experiments relate to edited cells expressing a non-limiting example of an anti-tumor CAR (here an anti-CD70 CAR), the use of the CD70 CAR (and any associated edits to CD70 expression which are made to avoid/reduce fratricide) are specific to these experiments, and the edited cells provided for herein may also be engineered to target tumor markers other than CD70. FIG. 51C shows that the combination of CISH/TGFBR2 edit confers the greatest degree of cytotoxicity on the edited cells, as compared to editing TGFBR2 or CISH. FIG. 51D shows additional data where co-culturing was done in the presence of TGFb. In this experiment the ability of the TGFb to negate the cytotoxic effects of the CISH/TGFBR2 edited cells was significantly reduced, showing that in some embodiments an immune cell edited at CISH and TGFBR2 and expressing an anti-tumor CAR has enhanced cytotoxicity (and/or persistence, in some embodiments).

[0614] FIGS. 52A and 52B relate to edits made to TIGIT. Here, a 1:4E:T ratio was used to co-culture NK cells edited at CISH, TIGIT, or a combination of CISH/TIGIT with 786-O target cells at day 21 post-edit. As with the CISH/CBLB and CISH/TGFBR2 edits, the combination edit of CISH and TIGIT led to superior cytotoxicity against the target cells. FIG. 52B shows experimental data when co-culture was performed in the presence of adenosine, a well-established suppressor of immune cell function. While the adenosine did reduce the cytotoxicity of each of the tested edited cells, the CISH/TIGIT edited cells remained the most cytotoxic, reinforcing the that edits to CISH in combination with another gene, like TIGIT (or others disclosed herein) enhances the cytotoxic activity (and/or persistence) of the edited NK cells.

[0615] FIGS. 53A-53D show additional data related to the effects of certain edits provided for herein. FIG. 53A shows a cytotoxicity curve for the various indicated edits against 786-O target cells at 14 days post-edit. FIG. 53B shows a histogram that reflects a summary of the data in FIG. 53A. The edits in this experiment were to CD70 (which as discussed above is specific to the model and avoiding fratricide based on the non-limiting example of a CD70 CAR), CISH, TGFBR2, CBLB, CISH/TGFBR2, or CISH/CBLB. As best seen in FIG. 53B, the edits that include CISH/CBLB (far right) and CISH/TGFBR2 (3^{rd} from right) yield some of the most cytotoxic NK cells tested. The edit to CBLB also imparts significant cytotoxicity to the edited NK cells. FIG. 53C shows corresponding data, wherein the co-culture was performed in the presence of TGFb. The summary data in FIG. 53D again reflect the immunosuppressive power of TGFb and the effectiveness of edits at reducing this effect. While the cytotoxicity of the edited NK cells was blunted in the presence of TGFb, the combination edits of CISH/TGFBR2 and CISH/CBLB still exhibited relatively robust cytotoxic effects on the target cells.

[0616] Similar experiments were performed using an alternative target cell, the ACHN RCC cells. FIGS. 54A-154B show the collected data. As depicted in FIG. 54A, each of the edited cells tested showed measurable control of tumor growth at a 1:4E:T. The CISH/TGFBR2 and CISH/CBLB (arrows) performed as well, if not better, than the cells not edited at those combinations. FIG. 54B shows a related experiment, using an E:T of 1:2 and in the presence of TGFb. Again, the CISH/TGFBR2 and CISH/CBLB (arrows) performed as well, if not better, than the cells not edited at those combinations.

[0617] FIGS. 55A-55D show additional data related to the effects of certain edits provided for herein. FIG. 55A shows a cytotoxicity curve for the various indicated edits against 786-O target cells at 28 days post-edit. FIG. 55B shows a histogram that reflects a summary of the data in FIG. 55A. As depicted in FIG. 55B, the combined edit of CISH/CBLB or CISH/TGFBR2 resulted in the most robust cytotoxicity against the target cells of any of the edits tested. FIGS. 55C/55D show corresponding data when TGFb was present in the co-culture. Notably, again, the combined edit of CISH/CBLB or CISH/TGFBR2 resulted in the most robust cytotoxicity against the target cells of any of the edits tested, despite the suppressive effects of the TGFb.

[0618] FIGS. 56A-56D show additional data related to the effects of certain edits provided for herein using ACHN cells as the target cells. FIG. 56A shows a cytotoxicity curve for the various indicated edits against ACHN target cells at 28 days post-edit. FIG. 56B shows a histogram that reflects a summary of the data in FIG. 56A. As depicted in FIG. 56B, the combined edit of CISH/CBLB or CISH/TGFBR2 resulted in the most robust cytotoxicity against the target cells of any of the edits tested. FIGS. 56C/56D show corresponding data when TGFb was present in the co-culture. Notably, again, the combined edit of CISH/CBLB or CISH/TGFBR2 resulted in the most robust cytotoxicity against the target cells of any of the edits tested, despite the suppressive effects of the TGFb.

[0619] Taken together, these data demonstrate that there is an unexpectedly powerful enhancement to the cytotoxicity of edited immune cells, such as NK cells (or T cells) when edited at multiple gene targets. For example, the combination of editing to reduce, substantially eliminate, or eliminate CIS protein expression or function, in combination with another target yields enhanced cytotoxicity and/or persistence of the edited cells. In several embodiments, edits to CISH and edits to reduce, substantially eliminate, or eliminate CBLB expression are provided for and result in enhanced anti-tumor effects, regardless of the tumor type (e.g., if used, for example with any CAR that targets a tumor). In several embodiments, a CISH/CBLB combination edit is used without an edit to a CD70 gene, and/or without expression of an anti-CD70 CAR. In several embodiments, a CISH/CBLB combination edit is used without expression of an anti-CD19 CAR. In several embodiments, a CISH/CBLB combination edit is used without an additional edit and without expression of an anti-CD19 CAR.

[0620] In additional embodiments, the combination of editing to reduce, substantially eliminate, or eliminate CIS protein expression or function, in combination with another target yields enhanced cytotoxicity and/or persistence of the edited cells. In several embodiments, edits to CISH and edits to reduce, substantially eliminate, or eliminate TGFBR2 expression are provided for and result in enhanced anti-tumor effects, regardless of the tumor type (e.g., if used, for example with any CAR that targets a tumor). In several embodiments, a CISH/TGFBR2 combination edit is used without an edit to a CD70 gene, and/or without expression of an anti-CD70 CAR. In several embodiments, a CISH/TGFBR2 combination edit is used without expression of an anti-CD19 CAR. In several embodiments, a CISH/TGFBR2 combination edit is used without an additional edit and without expression of an anti-CD19 CAR.

[0621] In additional embodiments, the combination of editing to reduce, substantially eliminate, or eliminate CIS protein expression or function, in combination with another target yields enhanced cytotoxicity and/or persistence of the edited cells. In several embodiments, edits to CISH and edits to reduce, substantially eliminate, or eliminate TIGIT expression are provided for and result in enhanced anti-tumor effects, regardless of the tumor type (e.g., if used, for example with any CAR that targets a tumor). In several embodiments, a CISH/TIGIT combination edit is used without an edit to a CD70 gene, and/or without expression of an anti-CD70 CAR. In several embodiments, a CISH/TIGIT combination edit is used without expression of an anti-CD19 CAR. In several embodiments, a CISH/TIGIT combination edit is used without an additional edit and without expression of an anti-CD19 CAR.

### Additional Embodiments

[0622] In several embodiments, there is provided a population of genetically engineered immune cells, comprising one or more of genetically engineered NK cells and genetically engineered T cells; wherein the plurality of genetically engineered immune cells are engineered to express a cytotoxic receptor comprising an extracellular ligand binding domain, a transmembrane domain, and a cytotoxic signaling complex, wherein the genetically engineered immune cells are genetically engineered to express at least one immunosuppressive effector, wherein the at least one immunosuppressive effector exerts suppressive effects on undesired cytotoxic activity of suppressive cells, wherein, optionally, the genetically engineered immune cells are further engineered to express one or more of the following: IL-15, mblL-15, at least one viral immunosuppressive peptide integrated within an extracellular region, or extracellular regions, of the cytotoxic receptor, at least one viral immunosuppressive peptide expressed on a cell membrane of the genetically engineered immune cells, at least one portion of a human immunosuppressive protein or protein complex integrated within an extracellular region, or extracellular regions, of the cytotoxic receptor, at least one portion of a human immunosuppressive protein or protein complex expressed on a cell membrane of the genetically engineered immune cells, and/or at least one chimeric viral-human immunosuppressive construct expressed on a cell membrane of the genetically engineered immune cells and/or integrated at one or more extracellular regions of the cytotoxic receptor.

[0623] In several embodiments, there is also provided a population of genetically engineered immune cells, comprising: a plurality of genetically engineered NK cells and a plurality of genetically engineered T cells; wherein each of the plurality of genetically engineered NK cells and the plurality of genetically engineered T cells are engineered to express a cytotoxic receptor comprising an extracellular ligand binding domain, a transmembrane domain, and a cytotoxic signaling complex, wherein the genetically engineered NK cells are also engineered to express membrane-bound IL15, wherein the genetically engineered immune cells are genetically engineered to express at least one immunosuppressive effector, wherein the at least one immunosuppressive effector exerts suppressive effects on undesired cytotoxic activity of suppressive cells, wherein the at least one immunosuppressive effector expressed by the plurality of genetically engineered T cells comprises HLA-E or a viral immunosuppressive peptide, wherein the HLA-E or the viral immunosuppressive peptide is configured to temporarily suppress NK cell activity against the genetically engineered T cells, wherein the NK cell activity arises either from host NK cells after administration to a subject or from the plurality of genetically engineered NK cells, and wherein the temporary suppression of activity of the genetically engineered NK cells reduces genetically engineered NK cell exhaustion and prolongs the persistence of the population of genetically engineered cells after administration.

[0624] In several embodiments, the is additionally provided a population of genetically engineered immune cells for cancer immunotherapy, comprising: a plurality of genetically engineered NK cells; wherein the plurality of genetically engineered immune cells are engineered to express a cytotoxic receptor, wherein the cytotoxic receptor comprises an extracellular ligand binding domain, a transmembrane domain, and a cytotoxic signaling complex, wherein the genetically engineered NK cells are engineered to express membrane bound IL-15, wherein the genetically engineered immune cells are genetically engineered to express at least one immunosuppressive effector, wherein the at least one immunosuppressive effector exerts suppressive effects on undesired cytotoxic activity of suppressive cells, wherein the genetically engineered immune cells exhibit one or more of enhanced expansion capability, enhanced cytotoxicity against target cells, and enhanced persistence, as compared to cells that do not comprise said immunosuppressive effector.

[0625] In several embodiments, the population, further comprises a second type of immune cells. In several embodiments, the second type of immune cells comprises genetically engineered T cells or other immune cells.

[0626] In several embodiments, there is also provided a population of genetically engineered immune cells for cancer immunotherapy, comprising genetically engineered immune cells that express a cytotoxic receptor comprising an extracellular ligand binding domain, a transmembrane domain, and a cytotoxic signaling complex, wherein the immune cells are genetically edited at one or more target sites in the genome of the immune cell to yield reduced levels of expression of a protein which is encoded by a gene which comprises an edited target site as compared to a non-edited immune cell, wherein the edits are made using a Crispr/Cas system, and wherein the genetically engineered immune cells are further engineered to express at least one immunosuppressive effector, wherein the at least one immunosuppressive effector exerts suppressive effects on the cytotoxic activity of natural killer cells and/or T cells, and wherein the genetically engineered and edited immune cells exhibit one or more of enhanced expansion capability, enhanced cytotoxicity against target cells, and enhanced persistence, as compared to cells that do not comprise said immunosuppressive effector and said edited gene.

[0627] In several embodiments, there is also provided a population of genetically engineered immune cells for cancer immunotherapy, comprising one or more of genetically engineered NK cells and genetically engineered T cells; wherein the genetically engineered immune cells are engineered to express a cytotoxic receptor, wherein the cytotoxic receptor comprises an extracellular ligand binding domain, a transmembrane domain, and a cytotoxic signaling complex, wherein the immune cells are genetically edited at one or more target sites in the genome of the immune cell to yield reduced levels of expression of a protein which is encoded by a gene which comprises an edited target site as compared to a non-edited immune cell, wherein the edits are made using an RNA-guided endonuclease, wherein the genetically engineered immune cells are further genetically engineered to express at least one immunosuppressive effector, wherein the at least one immunosuppressive effector exerts suppressive effects on the cytotoxic activity of undesired cells, wherein the undesired cells comprise one or more of non-engineered natural killer cells, non-engineered T cells, or undesired engineered cells, and wherein the genetically engineered and edited immune cells exhibit one or more of enhanced expansion capability, enhanced cytotoxicity against target cells, and enhanced persistence, as compared to cells that do not comprise said immunosuppressive effector and said edited gene.

[0628] In several embodiments, there is provided a population of genetically engineered immune cells for cancer immunotherapy, comprising one or more of genetically engineered NK cells and genetically engineered T cells; wherein the plurality of genetically engineered immune cells are engineered to express a cytotoxic receptor, wherein the cytotoxic receptor comprises an extracellular ligand binding domain, a transmembrane domain, and a cytotoxic signaling complex, wherein the immune cells are genetically edited at one or more target sites in the genome of the immune cell to yield reduced levels of expression of a protein which is encoded by a gene which comprises an edited target site as compared to a non-edited immune cell, immune cells are further genetically engineered to express at least one immunosuppressive effector, wherein the at least one immunosuppressive effector exerts suppressive effects on undesired cytotoxic activity of suppressive cells, wherein the genetically engineered immune cells exhibit one or more of enhanced expansion capability, enhanced cytotoxicity against target cells, and enhanced persistence, as compared to cells that do not comprise said immunosuppressive effector.

[0629] In several embodiments, the suppressive cells comprise host cells, non-engineered natural killer cells, non-engineered T cells, and/or suppressive engineered cells. In several embodiments, the suppressive engineered cells comprise the genetically engineered immune cells.

[0630] In several embodiments, the cells that do not comprise said immunosuppressive effector are either non-engineered or engineered cells.

[0631] In several embodiments, the genetically engineered immune cells are also genetically edited to reduce expression of beta-2 microglobulin (B2M), wherein the reduced expression of B2M enables the immune cells to be used in allogeneic cancer immunotherapy with reduced host versus graft rejection as compared to immune cells expressing endogenous levels of B2M.

[0632] In several embodiments, the cytotoxic receptor targets one or more of NKG2D, CD19, BCMA, CD70, and CD38 expressed by target tumor cells, and wherein the cytotoxic signaling complex comprises an OX40 subdomain or a 4-1 BB domain, and a CD3zeta subdomain.

[0633] In several embodiments, the at least one immunosuppressive effector comprises a virally-derived peptide, a peptide derived from a retrovirus, a peptide derived from an envelope protein of a retrovirus, at least a portion of a human protein and/or at least a portion of a human protein complex.

[0634] In several embodiments, the at least one immunosuppressive effector comprises a chimeric construct comprises at least one virally-derived peptide and at least a portion of a human protein and/or at least a portion of a human protein complex.

[0635] In several embodiments, the immunosuppressive effector is encoded by a nucleic acid or comprises a peptide having at least 85% sequence identity to one or more of the nucleotide or amino acid sequences of SEQ ID NOs: 683-894.

[0636] In several embodiments, the immunosuppressive effector comprises a peptide having at least 95% sequence identity to SEQ ID NO: 689.

[0637] In several embodiments, the immunosuppressive effector is encoded by a nucleic acid having at least 95% sequence identity to SEQ ID NO: 690.

[0638] In several embodiments, the immune cells comprise genetically engineered Natural Killer (NK) cells, genetically engineered T cells, or combinations thereof.

[0639] In several embodiments, the genetically engineered immune cells are suitable for use in allogeneic cancer cell therapy with reduced risk of graft versus host disease.

[0640] In several embodiments, the genetically engineered immune cells are suitable for use in allogeneic cancer cell therapy with reduced risk of cytotoxic activity between the genetically engineered immune cells.

[0641] In several embodiments, at least a portion of the genetically engineered immune cells are engineered to express membrane bound IL-15.

[0642] In several embodiments, at least about 60% of the NK cells are positive for NKG2A.

[0643] In several embodiments, at least about 80% of the NK cells are positive for NKG2A.

[0644] In several embodiments, the at least one immunosuppressive effector is integrated into the cytotoxic receptor: (i) between the transmembrane domain and the extracellular ligand-binding domain, (ii) within the extracellular ligand-binding domain, (iii) wherein the extracellular ligand-binding domain comprises an scFv and the at least one immunosuppressive effector is integrated into a linker region of the scFv, (iv) within an N-terminal region of the cytotoxic receptor distally positioned from the extracellular ligand-binding domain, and/or (v) at a plurality of locations within an extracellular region of the cytotoxic receptor.

[0645] In several embodiments, the at least one immunosuppressive effector is bound to an extracellular membrane of the immune cells.

[0646] In several embodiments, the at least one immunosuppressive effector comprises a transmembrane protein, wherein the transmembrane protein is selected from CD8α, CD4, CD3ε, CD3γ, CD3δ, CD3ζ, CD28, CD137, glycophorin A, glycophorin D, nicotinic acetylcholine receptor, a GABA receptor, FcεRIγ, and a T-cell receptor.

[0647] In several embodiments, the immunosuppressive effector is expressed on the immune cells by a disulfide trap single chain trimer (dtSCT).

[0648] In several embodiments, there are provided methods for the treatment of cancer in a subject comprising administering to the subject genetically engineered immune cells according to any of embodiments disclosed herein. In several embodiments, there is provided a use of genetically engineered immune cells according to embodiments disclosed herein for the treatment of cancer or for the preparation of a medicament for the treatment of cancer.

[0649] In several embodiments, there is provided a method of manufacturing a population of genetically engineered immune cells for cancer immunotherapy, comprising contacting a population of immune cells with an RNA-guided endonuclease to genetically edit one or more target sites in the genome of the immune cell to yield reduced levels of expression of a protein which is encoded by a gene which comprises an edited target site as compared to a non-edited immune cell; contacting the population of immune cells with a polynucleotide encoding a cytotoxic receptor comprising an extracellular ligand binding domain, a transmembrane domain, and a cytotoxic signaling complex; contacting the population of immune cells with an additional polynucleotide encoding at least one immunosuppressive effector, wherein the immunosuppressive effector is encoded by a nucleic acid or comprises a peptide having at least 85% sequence identity to one or more of the nucleotide or amino acid sequences of SEQ ID NOs: 683-894; wherein the at least one immunosuppressive effector exerts suppressive effects on the cytotoxic activity of suppressive cells, and wherein the genetically engineered immune cells exhibit one or more of enhanced expansion capability, enhanced cytotoxicity against target cells, and enhanced persistence, as compared to cells that do not comprise said at least one immunosuppressive effector.

[0650] In several embodiments, the target of the genetic editing is one or more of a CISH gene, a B2M gene, a CD70 gene, an adenosine receptor gene, an NKG2A gene, a CIITA gene, a TGFBR gene, or any combination thereof.

[0651] Also, there is provided a method of engineering a population of genetically engineered immune cells for enhanced allogeneic cancer immunotherapy, comprising genetically editing a mixed population of immune cells comprising NK cells and T cells to disrupt Beta-2 microglobulin (B2M) expression and coordinately reduce expression Human Leukocyte Antigen (HLA) on the surface of the immune cells, wherein reduced expression of HLA on the surface of the immune cells reduces T cell-mediated cytotoxicity against the edited population of immune cells, wherein reduced expression of HLA on the surface of the cells renders the edited population of immune cells susceptible to NK-mediated cytotoxicity against the edited immune cells; wherein at least about 60% of the NK cells in the mixed population are positive for NKG2A expression; and genetically engineering the edited cells to express one or more immunosuppressive effectors that reduce NK-mediated cytotoxicity against the mixed population of immune cells, wherein the one or more immunosuppressive effectors comprises one or more of a viral immunosuppressive peptide, a viral protein that is an HLA homolog, HLA-E, HLA-G, a human protein or fragment thereof that reduces phagocytosis of cells, a chimeric construct comprising a viral immunosuppressive peptide and a human protein or fragment thereof that reduces phagocytosis of cells, or combinations thereof, wherein the reduced T cell-mediated cytotoxicity reduces engineered T cell-mediated fratricidal cytotoxicity against engineered NK cells and, upon administration, host T-cell mediated cytotoxicity against engineered NK cells, and wherein the wherein the reduced NK cell-mediated cytotoxicity reduces engineered NK cell-mediated fratricidal cytotoxicity against engineered T cells and, upon administration, host NK cell-mediated cytotoxicity against engineered NK and engineered T cells, thereby allowing for enhanced persistence of the engineering mixed population of immune cells upon administration to an allogeneic subject and allowing for enhanced allogeneic cancer immunotherapy.

[0652] In several embodiments, the method further comprises contacting the mixed population of immune cells with a polynucleotide encoding a cytotoxic receptor comprising an extracellular ligand binding domain, a transmembrane domain, and a cytotoxic signaling complex.

[0653] In several embodiments, the polynucleotide encodes a cytotoxic receptor targeting one or more of NKG2D, CD19, CD70, BCMA, and CD38 expressed by target tumor cells.

[0654] In several embodiments, the method further comprises genetically editing the DNA of the genetically engineered immune cells to alter the expression of one or more of a CISH gene, a CD70 gene, an adenosine receptor gene, an NKG2A gene, a CIITA gene, a TGFBR gene, or any combination thereof.

[0655] In several embodiments, wherein the gene editing to reduce expression or the gene editing to induce expression is made using a CRISPR-Cas system, wherein the Cas is Cas9, Cas12, Cas13, CasX or CasY.

[0656] Additionally provided is a population of genetically engineered immune cells, comprising one or more of genetically engineered NK cells and genetically engineered T cells; wherein at least about 70% of the genetically engineered NK cells express NKG2A, wherein the plurality of genetically engineered immune cells are engineered to express a cytotoxic receptor comprising an extracellular ligand binding domain, a transmembrane domain, and a cytotoxic signaling complex, wherein the genetically engineered immune cells are genetically engineered to express at least one immunosuppressive effector derived from a Human Leukocyte Antigen (HLA), wherein the at least one immunosuppressive effector exerts suppressive effects on undesired cytotoxic activity of suppressive cells, wherein, optionally, the genetically engineered immune cells are further engineered to express one or more of the following: IL-15, mblL-15, at least one viral immunosuppressive peptide integrated within an extracellular region, or extracellular regions, of the cytotoxic receptor, at least one viral immunosuppressive peptide expressed on a cell membrane of the genetically engineered immune cells, at least one portion of a human immunosuppressive protein or protein complex integrated within an extracellular region, or extracellular regions, of the cytotoxic receptor, at least one portion of a human immunosuppressive protein or protein complex expressed on a cell membrane of the genetically engineered immune cells, and/or at least one chimeric viral-human immunosuppressive construct expressed on a cell membrane of the genetically engineered immune cells and/or integrated at one or more extracellular regions of the cytotoxic receptor.

[0657] In several embodiments, the immunosuppressive effector derived from an HLA comprises an HLA-E peptide.

[0658] It is contemplated that various combinations or subcombinations of the specific features and aspects of the embodiments disclosed above may be made and still fall within one or more of the inventions. Further, the disclosure herein of any particular feature, aspect, method, property, characteristic, quality, attribute, element, or the like in connection with an embodiment can be used in all other embodiments set forth herein. Accordingly, it should be understood that various features and aspects of the disclosed embodiments can be combined with or substituted for one another in order to form varying modes of the disclosed inventions. Thus, it is intended that the scope of the present inventions herein disclosed should not be limited by the particular disclosed embodiments described above. Moreover, while the invention is susceptible to various modifications, and alternative forms, specific examples thereof have been shown in the drawings and are herein described in detail. It should be understood, however, that the invention is not to be limited to the particular forms or methods disclosed, but to the contrary, the invention is to cover all modifications, equivalents, and alternatives falling within the spirit and scope of the various embodiments described and the appended claims. Any methods disclosed herein need not be performed in the order recited. The methods disclosed herein include certain actions taken by a practitioner; however, they can also include any third-party instruction of those actions, either expressly or by implication. In addition, where features or aspects of the disclosure are described in terms of Markush groups, those skilled in the art will recognize that the disclosure is also thereby described in terms of any individual member or subgroup of members of the Markush group.

[0659] The ranges disclosed herein also encompass any and all overlap, sub-ranges, and combinations thereof. Language such as “up to,” “at least,” “greater than,” “less than,” “between,” and the like includes the number recited. Numbers preceded by a term such as “about” or “approximately” include the recited numbers. For example, “about 90%” includes “90%.” In some embodiments, at least 95% sequence identity or homology includes 96%, 97%, 98%, 99%, and 100% sequence identity or homology to the reference sequence. In addition, when a sequence is disclosed as “comprising” a nucleotide or amino acid sequence, such a reference shall also include, unless otherwise indicated, that the sequence “comprises”, “consists of” or “consists essentially of” the recited sequence. Any titles or subheadings used herein are for organization purposes and should not be used to limit the scope of embodiments disclosed herein.

[0660] All references cited herein, including but not limited to published and unpublished applications, patents, and literature references, are incorporated herein by reference in their entirety and are hereby made a part of this specification. To the extent publications and patents or patent applications incorporated by reference contradict the disclosure contained in the specification, the specification is intended to supersede and/or take precedence over any such contradictory material.

### Sequences

[0661] In several embodiments, there are provided amino acid sequences that correspond to any of the nucleic acids disclosed herein (and/or included in the accompanying sequence listing), while accounting for degeneracy of the nucleic acid code. Furthermore, those sequences (whether nucleic acid or amino acid) that vary from those expressly disclosed herein (and/or included in the accompanying sequence listing), but have functional similarity or equivalency are also contemplated within the scope of the present disclosure. The foregoing includes mutants, truncations, substitutions, or other types of modifications. Additionally, it shall be appreciated that certain nucleic acid sequences, even if not expressly included within the sequence, comprise one of the three standard stop codons (TAA, TAG, or TGA) known in the standard genetic code.

[0662] In accordance with some embodiments described herein, any of the sequences may be used, or a truncated or mutated form of any of the sequences disclosed herein (and/or included in the accompanying sequence listing) may be used and in any combination.

1-100. (canceled)

101. A population of genetically engineered and gene edited immune cells, comprising:
genetically engineered immune cells that express a cytotoxic receptor comprising an extracellular ligand binding domain, a transmembrane domain, and a cytotoxic signaling complex,
wherein the extracellular ligand binding domain targets a tumor marker expressed by a target tumor cell,
wherein the immune cells are genetically edited at one or more target locations in a CISH gene that encodes a CIS protein, wherein the edits yield reduced expression and/or function of CIS as compared to an immune cell not edited at the location or locations in the CISH gene;
wherein the immune cells are genetically edited at one or more target locations in a Cbl proto-oncogene B protein (CBLB) gene that encodes CBLB protein, wherein the edits yield reduced expression and/or function of CBLB protein as compared to an immune cell not edited at the location or locations in the CBLB gene; and
wherein the genetically engineered and edited immune cells exhibit one or more of enhanced expansion capability, enhanced cytotoxicity against target cells, and enhanced persistence, as compared to immune cells that do not comprise said genetic edits at the CISH and CBLB genes.

102. The population of genetically engineered and gene edited immune cells of claim 101, wherein the immune cells are edited at one or more additional target sites in the genome of the immune cell to yield reduced levels of expression of the protein which is encoded by a gene which comprises an edited target site as compared to a non-edited immune cell.

103. The population of genetically engineered and gene edited immune cells of claim 101, wherein the genetically engineered and gene edited cells are edited at an additional target site in a gene encoding: transforming growth factor receptor beta 2 (TGFBR2), TIGIT, NKG2A, SOCS2, B2M, PD-1, TIM-3, or TCR alpha.

104. The population of genetically engineered and gene edited immune cells of claim 101, wherein:
(i) a guide sequence of any of SEQ ID NO: 153-157 or 562-565 is used to target the CISH gene; and/or
(ii) a guide sequence of any of SEQ ID NO: 164 to 166 or 552-555 is used to target the CBLB gene;

105. The population of genetically engineered and gene edited immune cells of claim 101, wherein the genetically engineered and gene edited immune cells express membrane-bound interleukin-15 (mbIL15).

106. The population of genetically engineered and gene edited immune cells of claim 101, wherein the cytotoxic signaling complex comprises an OX40 subdomain and CD3zeta subdomain.

107. The population of genetically engineered and gene edited immune cells of claim 101, wherein the genetically engineered and gene edited immune cells comprise Natural Killer (NK) cells, T cells, or combinations thereof.

108. The population of genetically engineered and gene edited immune cells of claim 101, wherein the cytotoxic receptor targets ligands of NKG2D, CD19, CD70, BCMA, CD38, GPRCSD, DLL3, EGFR, PSMA, or FLT3.

109. A method for the treatment of cancer in a subject comprising administering to the subject the population of genetically engineered and gene edited immune cells according to claim 101.

110. The method of claim 109, wherein the genetically engineered and gene edited immune cells express membrane-bound interleukin-15 (mbIL15).

111. The method of claim 109, wherein the genetically engineered and gene edited immune cells comprise Natural Killer (NK) cells.

112. The method of claim 111, wherein the genetically engineered and gene edited immune cells are allogeneic to the subject.

113. A method of manufacturing a population of genetically edited immune cells, comprising:
(a) contacting a population of immune cells with a first gene editing complex,
wherein the first gene editing complex edits at one or more target sites in a CISH gene of the immune cell to yield reduced levels of expression of CIS protein encoded by the CISH gene as compared to an immune cell not edited at the CISH gene; and
(b) contacting the population of immune cells with a second gene editing complex,
wherein the second gene editing complex edits at one or more target sites in:
(i) a CBLB gene of the immune cell to yield reduced levels of expression of CBLB protein encoded by the CBLB gene as compared to an immune cell not edited at the CBLB gene;
(ii) a TGFBR2 gene of the immune cell to yield reduced levels of expression of TGFBR2 protein encoded by the TGFBR2 gene as compared to an immune cell not edited at the TGFBR2 gene;
(iii) a TIGIT gene of the immune cell to yield reduced levels of expression of TIGIT protein encoded by the TIGIT gene as compared to an immune cell not edited at the TIGIT gene; or
(iv) an additional gene of the immune cell to yield reduced levels of expression of a protein encoded by the additional gene as compared to an immune cell not edited at the additional gene; and
wherein the genetically edited immune cells exhibit one or more of enhanced expansion capability, enhanced cytotoxicity against target cells, and enhanced persistence, as compared to immune cells that do not comprise said genetically edited target site or sites.

114. The method of claim 113, further comprising contacting the population of immune cells with a vector comprising a polynucleotide encoding a cytotoxic receptor comprising an extracellular ligand binding domain, a transmembrane domain, and a cytotoxic signaling complex.

115. The method of claim 113, wherein the immune cells comprise Natural Killer (NK) cells, T cells, or combinations thereof.

116. A population of genetically engineered and gene edited immune cells, comprising:
genetically engineered immune cells that express a cytotoxic receptor comprising an extracellular ligand binding domain, a transmembrane domain, and a cytotoxic signaling complex,
wherein the extracellular ligand binding domain targets a tumor marker selected from the group consisting of NKG2D ligands, CD19, CD70, BCMA, CD38, GPRC5D, CD138 DLL3, EGFR, PSMA, FLT3, and KREMEN2,
wherein at least a portion of the genetically engineered immune cells are engineered to express membrane bound IL-15,
wherein the immune cells are genetically edited at one or more target sites in the genome of the immune cell to yield reduced levels of expression of the protein which is encoded by a gene which comprises an edited target site as compared to a non-edited immune cell,
wherein the protein is selected from the group consisting of CISH, adenosine A2 receptor, SMAD3, MAPKAPK3, CEACAM1, DDIT4, TGFBR2R, NKG2A, SOCS2, CBLB, B2M, TIGIT, PD-1, TIM-3, CD38, TCR alpha, and any combination thereof, and
wherein the genetically engineered and edited immune cells exhibit one or more of enhanced expansion capability, enhanced cytotoxicity against target cells, and enhanced persistence, as compared to immune cells that do not comprise said genetically edited target site or sites.

117. A method for the treatment of cancer in a subject comprising administering to the subject at least a portion of the population of immune cells according to claim 116.

118. A population of genetically engineered immune cells, comprising:
genetically engineered immune cells that express a cytotoxic receptor comprising an extracellular ligand binding domain, a transmembrane domain, and a cytotoxic signaling complex,
wherein at least a portion of the genetically engineered immune cells are engineered to express membrane bound IL-15,
wherein the genetically engineered immune cells are engineered to express at least one immunosuppressive effector comprising: (i) two or more of a truncated human CD47, a p15E peptide, an HIV peptide, and an HTLV peptide, (ii) a truncated human CD47 domain and at least one p15E peptide, an HIV peptide, and an HTLV peptide, (iii) a truncated human CD47 domain and at least one HIV peptide, (iv) a truncated human CD47 domain and at least HTLV peptide, (v) a sequence having at least 95% sequence identity to one or more of SEQ ID Nos: 256, 259, 262, 265, 268, 271, or (vi) a viral UL18 protein,
wherein the at least one immunosuppressive effector exerts suppressive effects on undesired cytotoxic activity of suppressive cells, and
wherein the genetically engineered immune cells exhibit one or more of enhanced expansion capability, enhanced cytotoxicity against target cells, and enhanced persistence, as compared to cells that do not comprise said immunosuppressive effector.

119. A method of engineering a population of genetically engineered immune cells, comprising:
(a) genetically editing a mixed population of immune cells comprising NK cells and T cells to reduce expression Human Leukocyte Antigen (HLA) on the surface of the immune cells,
wherein reduced expression of HLA on the surface of the immune cells reduces T cell-mediated cytotoxicity against the edited population of immune cells,
wherein reduced expression of HLA on the surface of the cells renders the edited population of immune cells susceptible to NK-mediated cytotoxicity against the edited immune cells; and
(b) genetically engineering the edited cells to express one or more immunosuppressive effectors that reduce NK-mediated cytotoxicity against the mixed population of immune cells,
wherein the one or more immunosuppressive effectors comprises one or more of a viral immunosuppressive peptide, a viral protein that is an HLA homolog, HLA-E, HLA-G, a human protein or fragment thereof that reduces phagocytosis of cells, a chimeric construct comprising a viral immunosuppressive peptide and a human protein or fragment thereof that reduces phagocytosis of cells, or combinations thereof,
wherein the reduced T cell-mediated cytotoxicity reduces engineered T cell-mediated fratricidal cytotoxicity against engineered NK cells and, upon administration to a subject, host T-cell mediated cytotoxicity against engineered NK cells, and
wherein the reduced NK cell-mediated cytotoxicity reduces engineered NK cell-mediated fratricidal cytotoxicity against engineered T cells and, upon administration to a subject, host NK cell-mediated cytotoxicity against engineered NK and engineered T cells.

120. The method of claim 119, wherein the immune cells comprise Natural Killer (NK) cells.

The application's sequence listing, which the Patent Office published only in electronic form, follows.

SEQUENCE LISTING (996 sequences)

SEQ ID NO: 1 - DNA, 135 bp, Homo sapiens
  misc_feature: CD8alpha hinge - DNA
accacgacgccagcgccgcgaccaccaacaccggcgcccaccatcgcgtcgcagcccctgtccctgcgcccagaggcgtgccggccagcggcggggggcgcagtgcacacgagggggctggacttcgcctgtgat

SEQ ID NO: 2 - protein, 45 aa, Homo sapiens
  MISC_FEATURE: CD8a hinge - protein
TTTPAPRPPTPAPTIASQPLSLRPEACRPAAGGAVHTRGLDFACD

SEQ ID NO: 3 - DNA, 63 bp, Homo sapiens
  misc_feature: CD8 TM - DNA
atctacatctgggcgcccttggccgggacttgtggggtccttctcctgtcactggttatcacc

SEQ ID NO: 4 - protein, 21 aa, Homo sapiens
  MISC_FEATURE: CD8 TM - protein
IYIWAPLAGTCGVLLLSLVIT

SEQ ID NO: 5 - DNA, 111 bp, Homo sapiens
  misc_feature: OX40 - DNA
cggagggaccagaggctgccccccgatgcccacaagccccctgggggaggcagtttccggacccccatccaagaggagcaggccgacgcccactccaccctggccaagatc

SEQ ID NO: 6 - protein, 37 aa, Homo sapiens
  MISC_FEATURE: OX40 - protein
RRDQRLPPDAHKPPGGGSFRTPIQEEQADAHSTLAKI

SEQ ID NO: 7 - DNA, 336 bp, Homo sapiens
  misc_feature: CD3zeta - DNA
agagtgaagttcagcaggagcgcagacgcccccgcgtaccagcagggccagaaccagctctataacgagctcaatctaggacgaagagaggagtacgatgttttggacaagagacgtggccgggaccctgagatggggggaaagccgagaaggaagaaccctcaggaaggcctgtacaatgaactgcagaaagataagatggcggaggcctacagtgagattgggatgaaaggcgagcgccggaggggcaaggggcacgatggcctttaccagggtctcagtacagccaccaaggacacctacgacgcccttcacatgcaggccctgccccctcgc

SEQ ID NO: 8 - protein, 112 aa, Homo sapiens
  MISC_FEATURE: CD3zeta - protein
RVKFSRSADAPAYQQGQNQLYNELNLGRREEYDVLDKRRGRDPEMGGKPRRKNPQEGLYNELQKDKMAEAYSEIGMKGERRRGKGHDGLYQGLSTATKDTYDALHMQALPPR

SEQ ID NO: 9 - DNA, 63 bp, Homo sapiens
  misc_feature: T2A - DNA
ggctctggcgagggaaggggttccctgcttacttgcggcgacgtcgaagagaatcccggtccg

SEQ ID NO: 10 - protein, 21 aa, Homo sapiens
  MISC_FEATURE: T2A - protein
GSGEGRGSLLTCGDVEENPGP

SEQ ID NO: 11 - DNA, 342 bp, Homo sapiens
  misc_feature: IL15 - DNA
aactgggtcaacgtgattagcgatttgaagaaaatcgaggaccttatacagtctatgcatattgacgctacactgtatactgagagtgatgtacacccgtcctgtaaggtaacggccatgaaatgctttcttctggagctccaggtcatcagcttggagtctggggacgcaagcatccacgatacggttgaaaacctcatcatccttgcgaacaactctctctcatctaatggaaacgttacagagagtgggtgtaaggagtgcgaagagttggaagaaaaaaacatcaaagaatttcttcaatccttcgttcacatagtgcaaatgttcattaacacgtcc

SEQ ID NO: 12 - protein, 114 aa, Homo sapiens
  MISC_FEATURE: IL15 - protein
NWVNVISDLKKIEDLIQSMHIDATLYTESDVHPSCKVTAMKCFLLELQVISLESGDASIHDTVENLIILANNSLSSNGNVTESGCKECEELEEKNIKEFLQSFVHIVQMFINTS

SEQ ID NO: 13 - DNA, 207 bp, Homo sapiens
  misc_feature: CD8hinge/TM - DNA
actaccacacccgccccgaggccacctacgccggcaccgactatcgccagtcaacccctctctctgcgccccgaggcttgccggcctgcggctggtggggcggtccacacccggggcctggattttgcgtgcgatatatacatctgggcacctcttgccggcacctgcggagtgctgcttctctcactcgttattacgctgtactgc

SEQ ID NO: 14 - protein, 66 aa, Homo sapiens
  MISC_FEATURE: CD8hinge/TM - protein
TTTPAPRPPTPAPTIASQPLSLRPEACRPAAGGAVHTRGLDFACDIYIWAPLAGTCGVLLLSLVIT

SEQ ID NO: 15 - DNA, 30 bp, Homo sapiens
  misc_feature: Linker 1 (used after FLAG tag)  - DNA
ggcggtggtggctctggtggtggcggcagc

SEQ ID NO: 16 - protein, 10 aa, Homo sapiens
  MISC_FEATURE: Linker 1 (used after FLAG tag)  - protein
GGGGSGGGGS

SEQ ID NO: 17 - DNA, 30 bp, Homo sapiens
  misc_feature: Linker 2 - after neg. control binding domain - DNA
ggccaggccggctccggaggaggaggatcc

SEQ ID NO: 18 - protein, 10 aa, Homo sapiens
  MISC_FEATURE: Linker 2 - after neg. control binding domain - Protein
GQAGSGGGGS

SEQ ID NO: 19 - DNA, 12 bp, Homo sapiens
  misc_feature: Linker post scFv - DNA
ggccaggccggc

SEQ ID NO: 20 - protein, 4 aa, Homo sapiens
  MISC_FEATURE: Linker post scFv - protein
GQAG

SEQ ID NO: 21 - DNA, 33 bp, Homo sapiens
  misc_feature: Linker - DNA
  misc_feature: Misc Linker - DNA
ggcggcggcggtagcggtggtggcggctccgga

SEQ ID NO: 22 - protein, 11 aa, Homo sapiens
  MISC_FEATURE: Misc Linker - protein
GGGGSGGGGSG

SEQ ID NO: 23 - DNA, 18 bp, Homo sapiens
  misc_feature: Linker - DNA
ggccaggccggctccgga

SEQ ID NO: 24 - protein, 6 aa, Homo sapiens
  MISC_FEATURE: Linker - protein
GQAGSG

SEQ ID NO: 25 - DNA, 405 bp, Homo sapiens
  misc_feature: NKG2D Extracellular Fragment - DNA
ttattcaaccaagaagttcaaattcccttgaccgaaagttactgtggcccatgtcctaaaaactggatatgttacaaaaataactgctaccaattttttgatgagagtaaaaactggtatgagagccaggcttcttgtatgtctcaaaatgccagccttctgaaagtatacagcaaagaggaccaggatttacttaaactggtgaagtcatatcattggatgggactagtacacattccaacaaatggatcttggcagtgggaagatggctccattctctcacccaacctactaacaataattgaaatgcagaagggagactgtgcactctatgcctcgagctttaaaggctatatagaaaactgttcaactccaaatacgtacatctgcatgcaaaggactgtg

SEQ ID NO: 26 - protein, 135 aa, Homo sapiens
  MISC_FEATURE: NKG2D Extracellular Fragment - protein
LFNQEVQIPLTESYCGPCPKNWICYKNNCYQFFDESKNWYESQASCMSQNASLLKVYSKEDQDLLKLVKSYHWMGLVHIPTNGSWQWEDGSILSPNLLTIIEMQKGDCALYASSFKGYIENCSTPNTYICMQRTV

SEQ ID NO: 27 - DNA, 645 bp, Homo sapiens
  misc_feature: Full Human NKG2D - DNA
gggtggattcgtggtcggaggtctcgacacagctgggagatgagtgaatttcataattataacttggatctgaagaagagtgatttttcaacacgatggcaaaagcaaagatgtccagtagtcaaaagcaaatgtagagaaaatgcatctccattttttttctgctgcttcatcgctgtagccatgggaatccgtttcattattatggtaacaatatggagtgctgtattcctaaactcattattcaaccaagaagttcaaattcccttgaccgaaagttactgtggcccatgtcctaaaaactggatatgttacaaaaataactgctaccaattttttgatgagagtaaaaactggtatgagagccaggcttcttgtatgtctcaaaatgccagccttctgaaagtatacagcaaagaggaccaggatttacttaaactggtgaagtcatatcattggatgggactagtacacattccaacaaatggatcttggcagtgggaagatggctccattctctcacccaacctactaacaataattgaaatgcagaagggagactgtgcactctatgcctcgagctttaaaggctatatagaaaactgttcaactccaaatacgtacatctgcatgcaaaggactgtg

SEQ ID NO: 28 - DNA, 405 bp, Homo sapiens
  misc_feature: Codon optimized human NKG2D fragment - DNA
ctgttcaatcaggaagtccagatccccctgacagagtcttactgcggcccatgtcccaagaactggatctgctacaagaacaattgttatcagttctttgacgagagcaagaactggtatgagtcccaggcctcttgcatgagccagaatgcctctctgctgaaggtgtacagcaaggaggaccaggatctgctgaagctggtgaagtcctatcactggatgggcctggtgcacatccctacaaacggctcttggcagtgggaggacggctccatcctgtctccaaatctgctgaccatcatcgagatgcagaagggcgattgcgccctgtacgccagctccttcaagggctatatcgagaactgctccacacccaatacctacatctgtatgcagaggaccgtg

SEQ ID NO: 29 - DNA, 126 bp, Homo sapiens
  misc_feature: 4-1BB
aaacggggcagaaagaaactcctgtatatattcaaacaaccatttatgagaccagtacaaactactcaagaggaagatggctgtagctgccgatttccagaagaagaagaaggaggatgtgaactg

SEQ ID NO: 30 - protein, 29 aa, Homo sapiens
  MISC_FEATURE: Amino Acid Sequence CD28 Transmembrane domain
FWVLVVVGGVLACYSLLVTVAFIIFWVRS

SEQ ID NO: 31 - protein, 39 aa, Homo sapiens
  MISC_FEATURE: Amino Acid Sequence CD28 IC domain
KRSRLLHSDYMNMTPRRPGPTRKHYQPYAPPRDFAAYRS

SEQ ID NO: 32 - protein, 123 aa, Homo sapiens
  MISC_FEATURE: VL Nicholson et al.
DIQMTQTTSSLSASLGDRVTISCRASQDISKYLNWYQQKPDGTVKLLIYHTSRLHSGVPSRFSGSGSGTDYSLTISNLEQEDIATYFCQQGNTLPYTFGGGTKLEITRADAAPTVSIFPPSSN

SEQ ID NO: 33 - protein, 120 aa, Homo sapiens
  MISC_FEATURE: VH Nicholson et al.
EVKLQESGPGLVAPSQSLSVTCTVSGVSLPDYGVSWIRQPPRKGLEWLGVIWGSETTYYNSALKSRLTIIKDNSKSQVFLKMNSLQTDDTAIYYCAKHYYYGGSYAMDYWGQGTSVTVSS

SEQ ID NO: 34 - protein, 634 aa, Homo sapiens
  MISC_FEATURE: PRT Artificial Sequence CD19R zeta chimeric receptor
MLLLVTSLLLCELPHPAFLLIPDIQMTQTTSSLSASLGDRVTISCRASQDISKYLNWYQQKPDGTVKLLIYHTSRLHSGVPSRFSGSGSGTDYSLTISNLEQEDIATYFCQQGNTLPYTFGGGTKLEITGSTSGSGKPGSGEGSTKGEVKLQESGPGLVAPSQSLSVTCTVSGVSLPDYGVSWIRQPPRKGLEWLGVIWGSETTYYNSALKSRLTIIKDNSKSQVFLKMNSLQTDDTAIYYCAKHYYYGGSYAMDYWGQGTSVTVSSVEPKSSDKTHTCPPCPAPELLGGPSVFLFPPKPKDTLMISRTPEVTCVVVDVSHEDPEVKFNWYVDGVEVHNAKTKPREEQYNSTYRVVSVLTVLHQDWLNGKEYKCKVSNKALPAPIEKTISKAKGQPREPQVYTLPPSRDELTKNQVSLTCLVKGFYPSDIAVEWESNGQPENNYKTTPPVLDSDGSFFLYSKLTVDKSRWQQGNVFSCSVMHEALHNHYTQKSLSLSPGKMALIVLGGVAGLLLFIGLGIFFRVKFSRSADAPAYQQGQNQLYNELNLGRREEYDVLDKRRGRDPEMGGKPRRKNPQEGLYNELQKDKMAEAYSEIGMKGERRRGKGHDGLYQGLSTATKDTYDALHMQALPPR

SEQ ID NO: 35 - protein, 120 aa, Homo sapiens
  MISC_FEATURE: anti-CD19 scFv HCV
EVQLVESGGGLVQPGGSLRLSCAASGVSLPDYGVSWVRQAPGKGLEWVSVIWGSETTYYNSALKSRFTISRDNAKNSLYLQMNSLRAEDTAVYYCAKHYYYGGSYAMDYWGQGTLVTVSS

SEQ ID NO: 36 - protein, 107 aa, Homo sapiens
  MISC_FEATURE: anti-CD19 scFv HCV
DIQMTQSPSSLSASVGDRVTITCRASQDISKYLNWYQQKPGKAPKLLIYHTSRLHSGVPSRFSGSGSGTDFTLTISSLQPEDFATYYCQQGNTLPYTFGQGTKVEIK

SEQ ID NO: 37 - protein, 11 aa, Homo sapiens
  MISC_FEATURE: LC CDR1
RASQDISKYLN

SEQ ID NO: 38 - protein, 7 aa, Homo sapiens
  MISC_FEATURE: LC CDR2
HTSRLHS

SEQ ID NO: 39 - protein, 9 aa, Homo sapiens
  MISC_FEATURE: LC CDR3
QQGNTLPYT

SEQ ID NO: 40 - protein, 10 aa, Homo sapiens
  MISC_FEATURE: HC CDR1
GVSLPDYGVS

SEQ ID NO: 41 - protein, 16 aa, Homo sapiens
  MISC_FEATURE: HC CDR2
VIWGSETTYYSSSLKS

SEQ ID NO: 42 - protein, 16 aa, Homo sapiens
  MISC_FEATURE: HC CDR2 - alternative
VIWGSETTYYQSSLKS

SEQ ID NO: 43 - protein, 16 aa, Homo sapiens
  MISC_FEATURE: HC CDR2 - alternative 2
VIWGSETTYYNSSLKS

SEQ ID NO: 44 - protein, 12 aa, Homo sapiens
  MISC_FEATURE: HC CDR3
HYYYGGSYAMDY

SEQ ID NO: 45 - protein, 107 aa, Homo sapiens
  MISC_FEATURE: Light chain variable region 1
DIQMTQSPSSLSASVGDRVTITCRASQDISKYLNWYQQKPDQAPKLLIKHTSRLHSGVPSRFSGSGSGTDYTLTISSLQPEDFATYYCQQGNTLPYTFGQGTKLEIK

SEQ ID NO: 46 - protein, 107 aa, Homo sapiens
  MISC_FEATURE: Light chain variable region 2
DIQMTQSPSSLSASVGDRVTITCRASQDISKYLNWYQQKPGKAVKLLIYHTSRLHSGVPSRFSGSGSGTDYTLTISSLQPEDIATYFCQQGNTLPYTFGGGTKLEIK

SEQ ID NO: 47 - protein, 107 aa, Homo sapiens
  MISC_FEATURE: Light chain variable region 3
DIQMTQSPSFLSASVGDRVTITCRASQDISKYLNWYQQKPDQAPKLLIKHTSRLHSGVPSRFSGSGSGTDFTFTISSLQPEDIATYYCQQGNTLPYTFGQGTKLEIK

SEQ ID NO: 48 - protein, 107 aa, Homo sapiens
  MISC_FEATURE: Light chain variable region 4
DIQMTQSPSTLSASVGDRVTITCRASQDISKYLNWYQQKPDQAPKLLIKHTSRLHSGVPSRFSGSGSGTDFTFTISSLQPEDIATYYCQQGNTLPYTFGQGTKLEIK

SEQ ID NO: 49 - protein, 120 aa, Homo sapiens
  MISC_FEATURE: Heavy chain variable region 1
EVQLVESGGGLVQPGRSLRLSCTASGVSLPDYGVSWIRQPPGKGLEWIGVIWGSETTYYNSALKSRFTISRDNSKNTLYLQMNSLRAEDTAVYYCAKHYYYGGSYAMDYWGQGTLVTVSS

SEQ ID NO: 50 - protein, 120 aa, Homo sapiens
  MISC_FEATURE: Heavy chain variable region 2
QVQLQESGPGLVKPSETLSVTCTVSGVSLPDYGVSWIRQPPGKGLEWLGVIWGSETTYYNSALKSRLTISKDTSKNQVFLKMSSLTAADTAIYYCAKHYYYGGSYAMDYWGQGTLVTVSS

SEQ ID NO: 51 - protein, 120 aa, Homo sapiens
  MISC_FEATURE: Heavy chain variable region 3
EVQLVESGGGLVQPGRSLRLSCTASGVSLPDYGVSWVRQPPGKGLEWIGVIWGSETTYYNSALKSRFTISRDNSKNTLYLQMNSLRAEDTAVYYCAKHYYYGGSYAMDYWGQGTLVTVSS

SEQ ID NO: 52 - protein, 120 aa, Homo sapiens
  MISC_FEATURE: Heavy chain variable region 4
QVQLQESGPGLVKPSGTLSLTCAVSGVSLPDYGVSWIRQPPGKGLEWIGVIWGSETTYYNSALKSRVTISRDNSKNTLYLQMNSLRAEDTAVYYCAKHYYYGGSYAMDYWGQGTLVTVSS

SEQ ID NO: 53 - protein, 8 aa, Homo sapiens
  MISC_FEATURE: LC CDR1
RASQDISK

SEQ ID NO: 54 - protein, 7 aa, Homo sapiens
  MISC_FEATURE: LC CDR2
IYHTSRL

SEQ ID NO: 55 - protein, 9 aa, Homo sapiens
  MISC_FEATURE: LC CDR3
QQGNTLPYT

SEQ ID NO: 56 - protein, 10 aa, Homo sapiens
  MISC_FEATURE: HC CDR1
GVSLPDYGVS

SEQ ID NO: 57 - protein, 14 aa, Homo sapiens
  MISC_FEATURE: HC CDR2
VIWGSETTYYNSAL

SEQ ID NO: 58 - protein, 12 aa, Homo sapiens
  MISC_FEATURE: HC CDR3
HYYYGGSYAMDY

SEQ ID NO: 59 - DNA, 2210 bp, Homo sapiens
  misc_feature: NK19-1b DNA
ggatccgaattcgccgccaccatggccttaccagtgaccgccttgctcctgccgctggccttgctgctccacgccgccaggccggactacaaagacgatgacgataaaggcggtggtggctctggtggtggcggcagcgacatccagatgacacagactacatcctccctgtctgcctctctgggagacagagtcaccatcagttgcagggcaagtcaggacattagtaaatatttaaattggtatcagcagaaaccagatggaactgttaaactcctgatctaccatacatcaagattacactcaggagtcccatcaaggttcagtggcagtgggtctggaacagattattctctcaccattagcaacctggagcaagaagatattgccacttacttttgccaacagggtaatacgcttccgtacacgttcggaggggggaccaagctggagatcacaggtggcggtggctcgggcggtggtgggtcgggtggcggcggatctgaggtgaaactgcaggagtcaggacctggcctggtggcgccctcacagagcctgtccgtcacatgcactgtctcaggggtctcattacccgactatggtgtaagctggattcgccagcctccacgaaagggtctggagtggctgggagtaatatggggtagtgaaaccacatactataattcagctctcaaatccagactgaccatcatcaaggacaactccaagagccaagttttcttaaaaatgaacagtctgcaaactgatgacacagccatttactactgtgccaaacattattactacggtggtagctatgctatggactactggggccaaggaacctcagtcaccgtctcctcaaccacgacgccagcgccgcgaccaccaacaccggcgcccaccatcgcgtcgcagcccctgtccctgcgcccagaggcgtgccggccagcggcggggggcgcagtgcacacgagggggctggacttcgcctgtgatatctacatctgggcgcccttggccgggacttgtggggtccttctcctgtcactggttatcaccctttactgccggagggaccagaggctgccccccgatgcccacaagccccctgggggaggcagtttccggacccccatccaagaggagcaggccgacgcccactccaccctggccaagatcagagtgaagttcagcaggagcgcagacgcccccgcgtaccagcagggccagaaccagctctataacgagctcaatctaggacgaagagaggagtacgatgttttggacaagagacgtggccgggaccctgagatggggggaaagccgagaaggaagaaccctcaggaaggcctgtacaatgaactgcagaaagataagatggcggaggcctacagtgagattgggatgaaaggcgagcgccggaggggcaaggggcacgatggcctttaccagggtctcagtacagccaccaaggacacctacgacgcccttcacatgcaggccctgccccctcgcggctctggcgagggaaggggttccctgcttacttgcggcgacgtcgaagagaatcccggtccgatggccctcccagtaactgccctccttttgcccctcgcactccttcttcatgccgctcgccccaactgggtcaacgtgattagcgatttgaagaaaatcgaggaccttatacagtctatgcatattgacgctacactgtatactgagagtgatgtacacccgtcctgtaaggtaacggccatgaaatgctttcttctggagctccaggtcatcagcttggagtctggggacgcaagcatccacgatacggttgaaaacctcatcatccttgcgaacaactctctctcatctaatggaaacgttacagagagtgggtgtaaggagtgcgaagagttggaagaaaaaaacatcaaagaatttcttcaatccttcgttcacatagtgcaaatgttcattaacacgtccactaccacacccgccccgaggccacctacgccggcaccgactatcgccagtcaacccctctctctgcgccccgaggcttgccggcctgcggctggtggggcggtccacacccggggcctggattttgcgtgcgatatatacatctgggcacctcttgccggcacctgcggagtgctgcttctctcactcgttattacgctgtactgctaagcggccgcgtcgac

SEQ ID NO: 60 - protein, 724 aa, Homo sapiens
  MISC_FEATURE: NK19-1b Protein
MALPVTALLLPLALLLHAARPDYKDDDDKGGGGSGGGGSDIQMTQTTSSLSASLGDRVTISCRASQDISKYLNWYQQKPDGTVKLLIYHTSRLHSGVPSRFSGSGSGTDYSLTISNLEQEDIATYFCQQGNTLPYTFGGGTKLEITGGGGSGGGGSGGGGSEVKLQESGPGLVAPSQSLSVTCTVSGVSLPDYGVSWIRQPPRKGLEWLGVIWGSETTYYNSALKSRLTIIKDNSKSQVFLKMNSLQTDDTAIYYCAKHYYYGGSYAMDYWGQGTSVTVSSTTTPAPRPPTPAPTIASQPLSLRPEACRPAAGGAVHTRGLDFACDIYIWAPLAGTCGVLLLSLVITLYCRRDQRLPPDAHKPPGGGSFRTPIQEEQADAHSTLAKIRVKFSRSADAPAYQQGQNQLYNELNLGRREEYDVLDKRRGRDPEMGGKPRRKNPQEGLYNELQKDKMAEAYSEIGMKGERRRGKGHDGLYQGLSTATKDTYDALHMQALPPRGSGEGRGSLLTCGDVEENPGPMALPVTALLLPLALLLHAARPNWVNVISDLKKIEDLIQSMHIDATLYTESDVHPSCKVTAMKCFLLELQVISLESGDASIHDTVENLIILANNSLSSNGNVTESGCKECEELEEKNIKEFLQSFVHIVQMFINTSTTTPAPRPPTPAPTIASQPLSLRPEACRPAAGGAVHTRGLDFACDIYIWAPLAGTCGVLLLSLVITLYC

SEQ ID NO: 61 - DNA, 2231 bp, Homo sapiens
  misc_feature: NK19-2b DNA
ggatccgaattcgccgccaccatggccttaccagtgaccgccttgctcctgccgctggccttgctgctccacgccgccaggccggactacaaagacgatgacgataaaggcggtggtggctctggtggtggcggcagcgacatccagatgacacagactacatcctccctgtctgcctctctgggagacagagtcaccatcagttgcagggcaagtcaggacattagtaaatatttaaattggtatcagcagaaaccagatggaactgttaaactcctgatctaccatacatcaagattacactcaggagtcccatcaaggttcagtggcagtgggtctggaacagattattctctcaccattagcaacctggagcaagaagatattgccacttacttttgccaacagggtaatacgcttccgtacacgttcggaggggggaccaagctggagatcacaggtggcggtggctcgggcggtggtgggtcgggtggcggcggatctgaggtgaaactgcaggagtcaggacctggcctggtggcgccctcacagagcctgtccgtcacatgcactgtctcaggggtctcattacccgactatggtgtaagctggattcgccagcctccacgaaagggtctggagtggctgggagtaatatggggtagtgaaaccacatactataattcagctctcaaatccagactgaccatcatcaaggacaactccaagagccaagttttcttaaaaatgaacagtctgcaaactgatgacacagccatttactactgtgccaaacattattactacggtggtagctatgctatggactactggggccaaggaacctcagtcaccgtctcctcaaccacgacgccagcgccgcgaccaccaacaccggcgcccaccatcgcgtcgcagcccctgtccctgcgcccagaggcgtgccggccagcggcggggggcgcagtgcacacgagggggctggacttcgcctgtgatttttgggtgctggtggtggttggtggagtcctggcttgctatagcttgctagtaacagtggcctttattattttctgggtgaggagtaagaggagcaggctcctgcacagtgactacatgaacatgactccccgccgccccgggcccacccgcaagcattaccagccctatgccccaccacgcgacttcgcagcctatcgctccagagtgaagttcagcaggagcgcagacgcccccgcgtaccagcagggccagaaccagctctataacgagctcaatctaggacgaagagaggagtacgatgttttggacaagagacgtggccgggaccctgagatggggggaaagccgagaaggaagaaccctcaggaaggcctgtacaatgaactgcagaaagataagatggcggaggcctacagtgagattgggatgaaaggcgagcgccggaggggcaaggggcacgatggcctttaccagggtctcagtacagccaccaaggacacctacgacgcccttcacatgcaggccctgccccctcgcggctctggcgagggaaggggttccctgcttacttgcggcgacgtcgaagagaatcccggtccgatggccctcccagtaactgccctccttttgcccctcgcactccttcttcatgccgctcgccccaactgggtcaacgtgattagcgatttgaagaaaatcgaggaccttatacagtctatgcatattgacgctacactgtatactgagagtgatgtacacccgtcctgtaaggtaacggccatgaaatgctttcttctggagctccaggtcatcagcttggagtctggggacgcaagcatccacgatacggttgaaaacctcatcatccttgcgaacaactctctctcatctaatggaaacgttacagagagtgggtgtaaggagtgcgaagagttggaagaaaaaaacatcaaagaatttcttcaatccttcgttcacatagtgcaaatgttcattaacacgtccactaccacacccgccccgaggccacctacgccggcaccgactatcgccagtcaacccctctctctgcgccccgaggcttgccggcctgcggctggtggggcggtccacacccggggcctggattttgcgtgcgatatatacatctgggcacctcttgccggcacctgcggagtgctgcttctctcactcgttattacgctgtactgctaagcggccgcgtcgac

SEQ ID NO: 62 - protein, 731 aa, Homo sapiens
  MISC_FEATURE: NK19-2b Protein
MALPVTALLLPLALLLHAARPDYKDDDDKGGGGSGGGGSDIQMTQTTSSLSASLGDRVTISCRASQDISKYLNWYQQKPDGTVKLLIYHTSRLHSGVPSRFSGSGSGTDYSLTISNLEQEDIATYFCQQGNTLPYTFGGGTKLEITGGGGSGGGGSGGGGSEVKLQESGPGLVAPSQSLSVTCTVSGVSLPDYGVSWIRQPPRKGLEWLGVIWGSETTYYNSALKSRLTIIKDNSKSQVFLKMNSLQTDDTAIYYCAKHYYYGGSYAMDYWGQGTSVTVSSTTTPAPRPPTPAPTIASQPLSLRPEACRPAAGGAVHTRGLDFACDFWVLVVVGGVLACYSLLVTVAFIIFWVRSKRSRLLHSDYMNMTPRRPGPTRKHYQPYAPPRDFAAYRSRVKFSRSADAPAYQQGQNQLYNELNLGRREEYDVLDKRRGRDPEMGGKPRRKNPQEGLYNELQKDKMAEAYSEIGMKGERRRGKGHDGLYQGLSTATKDTYDALHMQALPPRGSGEGRGSLLTCGDVEENPGPMALPVTALLLPLALLLHAARPNWVNVISDLKKIEDLIQSMHIDATLYTESDVHPSCKVTAMKCFLLELQVISLESGDASIHDTVENLIILANNSLSSNGNVTESGCKECEELEEKNIKEFLQSFVHIVQMFINTSTTTPAPRPPTPAPTIASQPLSLRPEACRPAAGGAVHTRGLDFACDIYIWAPLAGTCGVLLLSLVITLYC

SEQ ID NO: 63 - DNA, 2213 bp, Homo sapiens
  misc_feature: NK19-3b DNA
ggatccgaattcgccgccaccatggccttaccagtgaccgccttgctcctgccgctggccttgctgctccacgccgccaggccggactacaaagacgatgacgataaaggcggtggtggctctggtggtggcggcagcgacatccagatgacacagactacatcctccctgtctgcctctctgggagacagagtcaccatcagttgcagggcaagtcaggacattagtaaatatttaaattggtatcagcagaaaccagatggaactgttaaactcctgatctaccatacatcaagattacactcaggagtcccatcaaggttcagtggcagtgggtctggaacagattattctctcaccattagcaacctggagcaagaagatattgccacttacttttgccaacagggtaatacgcttccgtacacgttcggaggggggaccaagctggagatcacaggtggcggtggctcgggcggtggtgggtcgggtggcggcggatctgaggtgaaactgcaggagtcaggacctggcctggtggcgccctcacagagcctgtccgtcacatgcactgtctcaggggtctcattacccgactatggtgtaagctggattcgccagcctccacgaaagggtctggagtggctgggagtaatatggggtagtgaaaccacatactataattcagctctcaaatccagactgaccatcatcaaggacaactccaagagccaagttttcttaaaaatgaacagtctgcaaactgatgacacagccatttactactgtgccaaacattattactacggtggtagctatgctatggactactggggccaaggaacctcagtcaccgtctcctcaaccacgacgccagcgccgcgaccaccaacaccggcgcccaccatcgcgtcgcagcccctgtccctgcgcccagaggcgtgccggccagcggcggggggcgcagtgcacacgagggggctggacttcgcctgtgatatctacatctgggcgcccttggccgggacttgtggggtccttctcctgtcactggttatcaccctttactgctgttggcttacaaaaaagaagtattcatccagtgtgcacgaccctaacggtgaatacatgttcatgagagcagtgaacacagccaaaaaatctagactcacagatgtgaccctaagagtgaagttcagcaggagcgcagacgcccccgcgtaccagcagggccagaaccagctctataacgagctcaatctaggacgaagagaggagtacgatgttttggacaagagacgtggccgggaccctgagatggggggaaagccgagaaggaagaaccctcaggaaggcctgtacaatgaactgcagaaagataagatggcggaggcctacagtgagattgggatgaaaggcgagcgccggaggggcaaggggcacgatggcctttaccagggtctcagtacagccaccaaggacacctacgacgcccttcacatgcaggccctgccccctcgcggctctggcgagggaaggggttccctgcttacttgcggcgacgtcgaagagaatcccggtccgatggccctcccagtaactgccctccttttgcccctcgcactccttcttcatgccgctcgccccaactgggtcaacgtgattagcgatttgaagaaaatcgaggaccttatacagtctatgcatattgacgctacactgtatactgagagtgatgtacacccgtcctgtaaggtaacggccatgaaatgctttcttctggagctccaggtcatcagcttggagtctggggacgcaagcatccacgatacggttgaaaacctcatcatccttgcgaacaactctctctcatctaatggaaacgttacagagagtgggtgtaaggagtgcgaagagttggaagaaaaaaacatcaaagaatttcttcaatccttcgttcacatagtgcaaatgttcattaacacgtccactaccacacccgccccgaggccacctacgccggcaccgactatcgccagtcaacccctctctctgcgccccgaggcttgccggcctgcggctggtggggcggtccacacccggggcctggattttgcgtgcgatatatacatctgggcacctcttgccggcacctgcggagtgctgcttctctcactcgttattacgctgtactgctaagcggccgcgtcgac

SEQ ID NO: 64 - protein, 725 aa, Homo sapiens
  MISC_FEATURE: NK19-3b Protein
MALPVTALLLPLALLLHAARPDYKDDDDKGGGGSGGGGSDIQMTQTTSSLSASLGDRVTISCRASQDISKYLNWYQQKPDGTVKLLIYHTSRLHSGVPSRFSGSGSGTDYSLTISNLEQEDIATYFCQQGNTLPYTFGGGTKLEITGGGGSGGGGSGGGGSEVKLQESGPGLVAPSQSLSVTCTVSGVSLPDYGVSWIRQPPRKGLEWLGVIWGSETTYYNSALKSRLTIIKDNSKSQVFLKMNSLQTDDTAIYYCAKHYYYGGSYAMDYWGQGTSVTVSSTTTPAPRPPTPAPTIASQPLSLRPEACRPAAGGAVHTRGLDFACDIYIWAPLAGTCGVLLLSLVITLYCCWLTKKKYSSSVHDPNGEYMFMRAVNTAKKSRLTDVTLRVKFSRSADAPAYQQGQNQLYNELNLGRREEYDVLDKRRGRDPEMGGKPRRKNPQEGLYNELQKDKMAEAYSEIGMKGERRRGKGHDGLYQGLSTATKDTYDALHMQALPPRGSGEGRGSLLTCGDVEENPGPMALPVTALLLPLALLLHAARPNWVNVISDLKKIEDLIQSMHIDATLYTESDVHPSCKVTAMKCFLLELQVISLESGDASIHDTVENLIILANNSLSSNGNVTESGCKECEELEEKNIKEFLQSFVHIVQMFINTSTTTPAPRPPTPAPTIASQPLSLRPEACRPAAGGAVHTRGLDFACDIYIWAPLAGTCGVLLLSLVITLYC

SEQ ID NO: 65 - DNA, 2357 bp, Homo sapiens
  misc_feature: NK19-4b DNA
ggatccgaattcgccgccaccatggccttaccagtgaccgccttgctcctgccgctggccttgctgctccacgccgccaggccggactacaaagacgatgacgataaaggcggtggtggctctggtggtggcggcagcgacatccagatgacacagactacatcctccctgtctgcctctctgggagacagagtcaccatcagttgcagggcaagtcaggacattagtaaatatttaaattggtatcagcagaaaccagatggaactgttaaactcctgatctaccatacatcaagattacactcaggagtcccatcaaggttcagtggcagtgggtctggaacagattattctctcaccattagcaacctggagcaagaagatattgccacttacttttgccaacagggtaatacgcttccgtacacgttcggaggggggaccaagctggagatcacaggtggcggtggctcgggcggtggtgggtcgggtggcggcggatctgaggtgaaactgcaggagtcaggacctggcctggtggcgccctcacagagcctgtccgtcacatgcactgtctcaggggtctcattacccgactatggtgtaagctggattcgccagcctccacgaaagggtctggagtggctgggagtaatatggggtagtgaaaccacatactataattcagctctcaaatccagactgaccatcatcaaggacaactccaagagccaagttttcttaaaaatgaacagtctgcaaactgatgacacagccatttactactgtgccaaacattattactacggtggtagctatgctatggactactggggccaaggaacctcagtcaccgtctcctcaaccacgacgccagcgccgcgaccaccaacaccggcgcccaccatcgcgtcgcagcccctgtccctgcgcccagaggcgtgccggccagcggcggggggcgcagtgcacacgagggggctggacttcgcctgtgatttttgggtgctggtggtggttggtggagtcctggcttgctatagcttgctagtaacagtggcctttattattttctgggtgaggagtaagaggagcaggctcctgcacagtgactacatgaacatgactccccgccgccccgggcccacccgcaagcattaccagccctatgccccaccacgcgacttcgcagcctatcgctccaaacggggcagaaagaaactcctgtatatattcaaacaaccatttatgagaccagtacaaactactcaagaggaagatggctgtagctgccgatttccagaagaagaagaaggaggatgtgaactgagagtgaagttcagcaggagcgcagacgcccccgcgtaccagcagggccagaaccagctctataacgagctcaatctaggacgaagagaggagtacgatgttttggacaagagacgtggccgggaccctgagatggggggaaagccgagaaggaagaaccctcaggaaggcctgtacaatgaactgcagaaagataagatggcggaggcctacagtgagattgggatgaaaggcgagcgccggaggggcaaggggcacgatggcctttaccagggtctcagtacagccaccaaggacacctacgacgcccttcacatgcaggccctgccccctcgcggctctggcgagggaaggggttccctgcttacttgcggcgacgtcgaagagaatcccggtccgatggccctcccagtaactgccctccttttgcccctcgcactccttcttcatgccgctcgccccaactgggtcaacgtgattagcgatttgaagaaaatcgaggaccttatacagtctatgcatattgacgctacactgtatactgagagtgatgtacacccgtcctgtaaggtaacggccatgaaatgctttcttctggagctccaggtcatcagcttggagtctggggacgcaagcatccacgatacggttgaaaacctcatcatccttgcgaacaactctctctcatctaatggaaacgttacagagagtgggtgtaaggagtgcgaagagttggaagaaaaaaacatcaaagaatttcttcaatccttcgttcacatagtgcaaatgttcattaacacgtccactaccacacccgccccgaggccacctacgccggcaccgactatcgccagtcaacccctctctctgcgccccgaggcttgccggcctgcggctggtggggcggtccacacccggggcctggattttgcgtgcgatatatacatctgggcacctcttgccggcacctgcggagtgctgcttctctcactcgttattacgctgtactgctaagcggccgcgtcgac

SEQ ID NO: 66 - protein, 773 aa, Homo sapiens
  MISC_FEATURE: NK19-4b Protein
MALPVTALLLPLALLLHAARPDYKDDDDKGGGGSGGGGSDIQMTQTTSSLSASLGDRVTISCRASQDISKYLNWYQQKPDGTVKLLIYHTSRLHSGVPSRFSGSGSGTDYSLTISNLEQEDIATYFCQQGNTLPYTFGGGTKLEITGGGGSGGGGSGGGGSEVKLQESGPGLVAPSQSLSVTCTVSGVSLPDYGVSWIRQPPRKGLEWLGVIWGSETTYYNSALKSRLTIIKDNSKSQVFLKMNSLQTDDTAIYYCAKHYYYGGSYAMDYWGQGTSVTVSSTTTPAPRPPTPAPTIASQPLSLRPEACRPAAGGAVHTRGLDFACDFWVLVVVGGVLACYSLLVTVAFIIFWVRSKRSRLLHSDYMNMTPRRPGPTRKHYQPYAPPRDFAAYRSKRGRKKLLYIFKQPFMRPVQTTQEEDGCSCRFPEEEEGGCELRVKFSRSADAPAYQQGQNQLYNELNLGRREEYDVLDKRRGRDPEMGGKPRRKNPQEGLYNELQKDKMAEAYSEIGMKGERRRGKGHDGLYQGLSTATKDTYDALHMQALPPRGSGEGRGSLLTCGDVEENPGPMALPVTALLLPLALLLHAARPNWVNVISDLKKIEDLIQSMHIDATLYTESDVHPSCKVTAMKCFLLELQVISLESGDASIHDTVENLIILANNSLSSNGNVTESGCKECEELEEKNIKEFLQSFVHIVQMFINTSTTTPAPRPPTPAPTIASQPLSLRPEACRPAAGGAVHTRGLDFACDIYIWAPLAGTCGVLLLSLVITLYC

SEQ ID NO: 67 - DNA, 2201 bp, Homo sapiens
  misc_feature: NK19-5b DNA
ggatccgaattcgccgccaccatggccttaccagtgaccgccttgctcctgccgctggccttgctgctccacgccgccaggccggactacaaagacgatgacgataaaggcggtggtggctctggtggtggcggcagcgacatccagatgacacagactacatcctccctgtctgcctctctgggagacagagtcaccatcagttgcagggcaagtcaggacattagtaaatatttaaattggtatcagcagaaaccagatggaactgttaaactcctgatctaccatacatcaagattacactcaggagtcccatcaaggttcagtggcagtgggtctggaacagattattctctcaccattagcaacctggagcaagaagatattgccacttacttttgccaacagggtaatacgcttccgtacacgttcggaggggggaccaagctggagatcacaggtggcggtggctcgggcggtggtgggtcgggtggcggcggatctgaggtgaaactgcaggagtcaggacctggcctggtggcgccctcacagagcctgtccgtcacatgcactgtctcaggggtctcattacccgactatggtgtaagctggattcgccagcctccacgaaagggtctggagtggctgggagtaatatggggtagtgaaaccacatactataattcagctctcaaatccagactgaccatcatcaaggacaactccaagagccaagttttcttaaaaatgaacagtctgcaaactgatgacacagccatttactactgtgccaaacattattactacggtggtagctatgctatggactactggggccaaggaacctcagtcaccgtctcctcaaccacgacgccagcgccgcgaccaccaacaccggcgcccaccatcgcgtcgcagcccctgtccctgcgcccagaggcgtgccggccagcggcggggggcgcagtgcacacgagggggctggacttcgcctgtgatccattttttttctgctgcttcatcgctgtagccatgggaatccgtttcattattatggtaacacggagggaccagaggctgccccccgatgcccacaagccccctgggggaggcagtttccggacccccatccaagaggagcaggccgacgcccactccaccctggccaagatcagagtgaagttcagcaggagcgcagacgcccccgcgtaccagcagggccagaaccagctctataacgagctcaatctaggacgaagagaggagtacgatgttttggacaagagacgtggccgggaccctgagatggggggaaagccgagaaggaagaaccctcaggaaggcctgtacaatgaactgcagaaagataagatggcggaggcctacagtgagattgggatgaaaggcgagcgccggaggggcaaggggcacgatggcctttaccagggtctcagtacagccaccaaggacacctacgacgcccttcacatgcaggccctgccccctcgcggctctggcgagggaaggggttccctgcttacttgcggcgacgtcgaagagaatcccggtccgatggccctcccagtaactgccctccttttgcccctcgcactccttcttcatgccgctcgccccaactgggtcaacgtgattagcgatttgaagaaaatcgaggaccttatacagtctatgcatattgacgctacactgtatactgagagtgatgtacacccgtcctgtaaggtaacggccatgaaatgctttcttctggagctccaggtcatcagcttggagtctggggacgcaagcatccacgatacggttgaaaacctcatcatccttgcgaacaactctctctcatctaatggaaacgttacagagagtgggtgtaaggagtgcgaagagttggaagaaaaaaacatcaaagaatttcttcaatccttcgttcacatagtgcaaatgttcattaacacgtccactaccacacccgccccgaggccacctacgccggcaccgactatcgccagtcaacccctctctctgcgccccgaggcttgccggcctgcggctggtggggcggtccacacccggggcctggattttgcgtgcgatatatacatctgggcacctcttgccggcacctgcggagtgctgcttctctcactcgttattacgctgtactgctaagcggccgcgtcgac

SEQ ID NO: 68 - protein, 721 aa, Homo sapiens
  MISC_FEATURE: NK19-5b Protein
MALPVTALLLPLALLLHAARPDYKDDDDKGGGGSGGGGSDIQMTQTTSSLSASLGDRVTISCRASQDISKYLNWYQQKPDGTVKLLIYHTSRLHSGVPSRFSGSGSGTDYSLTISNLEQEDIATYFCQQGNTLPYTFGGGTKLEITGGGGSGGGGSGGGGSEVKLQESGPGLVAPSQSLSVTCTVSGVSLPDYGVSWIRQPPRKGLEWLGVIWGSETTYYNSALKSRLTIIKDNSKSQVFLKMNSLQTDDTAIYYCAKHYYYGGSYAMDYWGQGTSVTVSSTTTPAPRPPTPAPTIASQPLSLRPEACRPAAGGAVHTRGLDFACDPFFFCCFIAVAMGIRFIIMVTRRDQRLPPDAHKPPGGGSFRTPIQEEQADAHSTLAKIRVKFSRSADAPAYQQGQNQLYNELNLGRREEYDVLDKRRGRDPEMGGKPRRKNPQEGLYNELQKDKMAEAYSEIGMKGERRRGKGHDGLYQGLSTATKDTYDALHMQALPPRGSGEGRGSLLTCGDVEENPGPMALPVTALLLPLALLLHAARPNWVNVISDLKKIEDLIQSMHIDATLYTESDVHPSCKVTAMKCFLLELQVISLESGDASIHDTVENLIILANNSLSSNGNVTESGCKECEELEEKNIKEFLQSFVHIVQMFINTSTTTPAPRPPTPAPTIASQPLSLRPEACRPAAGGAVHTRGLDFACDIYIWAPLAGTCGVLLLSLVITLYC

SEQ ID NO: 69 - DNA, 1805 bp, Homo sapiens
  misc_feature: NK19-6b DNA
ggatccgaattcgccgccaccatggccttaccagtgaccgccttgctcctgccgctggccttgctgctccacgccgccaggccggactacaaagacgatgacgataaaggcggtggtggctctggtggtggcggcagcgacatccagatgacacagactacatcctccctgtctgcctctctgggagacagagtcaccatcagttgcagggcaagtcaggacattagtaaatatttaaattggtatcagcagaaaccagatggaactgttaaactcctgatctaccatacatcaagattacactcaggagtcccatcaaggttcagtggcagtgggtctggaacagattattctctcaccattagcaacctggagcaagaagatattgccacttacttttgccaacagggtaatacgcttccgtacacgttcggaggggggaccaagctggagatcacaaccacgacgccagcgccgcgaccaccaacaccggcgcccaccatcgcgtcgcagcccctgtccctgcgcccagaggcgtgccggccagcggcggggggcgcagtgcacacgagggggctggacttcgcctgtgatatctacatctgggcgcccttggccgggacttgtggggtccttctcctgtcactggttatcaccctttactgccggagggaccagaggctgccccccgatgcccacaagccccctgggggaggcagtttccggacccccatccaagaggagcaggccgacgcccactccaccctggccaagatcagagtgaagttcagcaggagcgcagacgcccccgcgtaccagcagggccagaaccagctctataacgagctcaatctaggacgaagagaggagtacgatgttttggacaagagacgtggccgggaccctgagatggggggaaagccgagaaggaagaaccctcaggaaggcctgtacaatgaactgcagaaagataagatggcggaggcctacagtgagattgggatgaaaggcgagcgccggaggggcaaggggcacgatggcctttaccagggtctcagtacagccaccaaggacacctacgacgcccttcacatgcaggccctgccccctcgcggctctggcgagggaaggggttccctgcttacttgcggcgacgtcgaagagaatcccggtccgatggccctcccagtaactgccctccttttgcccctcgcactccttcttcatgccgctcgccccaactgggtcaacgtgattagcgatttgaagaaaatcgaggaccttatacagtctatgcatattgacgctacactgtatactgagagtgatgtacacccgtcctgtaaggtaacggccatgaaatgctttcttctggagctccaggtcatcagcttggagtctggggacgcaagcatccacgatacggttgaaaacctcatcatccttgcgaacaactctctctcatctaatggaaacgttacagagagtgggtgtaaggagtgcgaagagttggaagaaaaaaacatcaaagaatttcttcaatccttcgttcacatagtgcaaatgttcattaacacgtccactaccacacccgccccgaggccacctacgccggcaccgactatcgccagtcaacccctctctctgcgccccgaggcttgccggcctgcggctggtggggcggtccacacccggggcctggattttgcgtgcgatatatacatctgggcacctcttgccggcacctgcggagtgctgcttctctcactcgttattacgctgtactgctaagcggccgcgtcgac

SEQ ID NO: 70 - protein, 589 aa, Homo sapiens
  MISC_FEATURE: NK19-6b Protein
MALPVTALLLPLALLLHAARPDYKDDDDKGGGGSGGGGSDIQMTQTTSSLSASLGDRVTISCRASQDISKYLNWYQQKPDGTVKLLIYHTSRLHSGVPSRFSGSGSGTDYSLTISNLEQEDIATYFCQQGNTLPYTFGGGTKLEITTTTPAPRPPTPAPTIASQPLSLRPEACRPAAGGAVHTRGLDFACDIYIWAPLAGTCGVLLLSLVITLYCRRDQRLPPDAHKPPGGGSFRTPIQEEQADAHSTLAKIRVKFSRSADAPAYQQGQNQLYNELNLGRREEYDVLDKRRGRDPEMGGKPRRKNPQEGLYNELQKDKMAEAYSEIGMKGERRRGKGHDGLYQGLSTATKDTYDALHMQALPPRGSGEGRGSLLTCGDVEENPGPMALPVTALLLPLALLLHAARPNWVNVISDLKKIEDLIQSMHIDATLYTESDVHPSCKVTAMKCFLLELQVISLESGDASIHDTVENLIILANNSLSSNGNVTESGCKECEELEEKNIKEFLQSFVHIVQMFINTSTTTPAPRPPTPAPTIASQPLSLRPEACRPAAGGAVHTRGLDFACDIYIWAPLAGTCGVLLLSLVITLYC

SEQ ID NO: 71 - DNA, 3347 bp, Homo sapiens
  misc_feature: NK19-7b DNA
ggatccgaattcgccgccaccatggccttaccagtgaccgccttgctcctgccgctggccttgctgctccacgccgccaggccggactacaaagacgatgacgataaaggcggtggtggctctggtggtggcggcagcgacatccagatgacacagactacatcctccctgtctgcctctctgggagacagagtcaccatcagttgcagggcaagtcaggacattagtaaatatttaaattggtatcagcagaaaccagatggaactgttaaactcctgatctaccatacatcaagattacactcaggagtcccatcaaggttcagtggcagtgggtctggaacagattattctctcaccattagcaacctggagcaagaagatattgccacttacttttgccaacagggtaatacgcttccgtacacgttcggaggggggaccaagctggagatcacaggtggcggtggctcgggcggtggtgggtcgggtggcggcggatctgaggtgaaactgcaggagtcaggacctggcctggtggcgccctcacagagcctgtccgtcacatgcactgtctcaggggtctcattacccgactatggtgtaagctggattcgccagcctccacgaaagggtctggagtggctgggagtaatatggggtagtgaaaccacatactataattcagctctcaaatccagactgaccatcatcaaggacaactccaagagccaagttttcttaaaaatgaacagtctgcaaactgatgacacagccatttactactgtgccaaacattattactacggtggtagctatgctatggactactggggccaaggaacctcagtcaccgtctcctcaaccacgacgccagcgccgcgaccaccaacaccggcgcccaccatcgcgtcgcagcccctgtccctgcgcccagaggcgtgccggccagcggcggggggcgcagtgcacacgagggggctggacttcgcctgtgatatctacatctgggcgcccttggccgggacttgtggggtccttctcctgtcactggttatcaccctttactgccggagggaccagaggctgccccccgatgcccacaagccccctgggggaggcagtttccggacccccatccaagaggagcaggccgacgcccactccaccctggccaagatcagagtgaagttcagcaggagcgcagacgcccccgcgtaccagcagggccagaaccagctctataacgagctcaatctaggacgaagagaggagtacgatgttttggacaagagacgtggccgggaccctgagatggggggaaagccgagaaggaagaaccctcaggaaggcctgtacaatgaactgcagaaagataagatggcggaggcctacagtgagattgggatgaaaggcgagcgccggaggggcaaggggcacgatggcctttaccagggtctcagtacagccaccaaggacacctacgacgcccttcacatgcaggccctgccccctcgcggctctggcgagggaaggggttccctgcttacttgcggcgacgtcgaagagaatcccggtccgatggccctcccagtaactgccctccttttgcccctcgcactccttcttcatgccgctcgccccaactgggtcaacgtgattagcgatttgaagaaaatcgaggaccttatacagtctatgcatattgacgctacactgtatactgagagtgatgtacacccgtcctgtaaggtaacggccatgaaatgctttcttctggagctccaggtcatcagcttggagtctggggacgcaagcatccacgatacggttgaaaacctcatcatccttgcgaacaactctctctcatctaatggaaacgttacagagagtgggtgtaaggagtgcgaagagttggaagaaaaaaacatcaaagaatttcttcaatccttcgttcacatagtgcaaatgttcattaacacgtccactaccacacccgccccgaggccacctacgccggcaccgactatcgccagtcaacccctctctctgcgccccgaggcttgccggcctgcggctggtggggcggtccacacccggggcctggattttgcgtgcgatatatacatctgggcacctcttgccggcacctgcggagtgctgcttctctcactcgttattacgctgtactgcggcagcggcgccacaaacttctctctgctaaagcaagcaggtgatgttgaagaaaaccccgggcctatgcttctcctggtgacaagccttctgctctgtgagttaccacacccagcattcctcctgatcccacgcaaagtgtgtaacggaataggtattggtgaatttaaagactcactctccataaatgctacgaatattaaacacttcaaaaactgcacctccatcagtggcgatctccacatcctgccggtggcatttaggggtgactccttcacacatactcctcctctggatccacaggaactggatattctgaaaaccgtaaaggaaatcacagggtttttgctgattcaggcttggcctgaaaacaggacggacctccatgcctttgagaacctagaaatcatacgcggcaggaccaagcaacatggtcagttttctcttgcagtcgtcagcctgaacataacatccttgggattacgctccctcaaggagataagtgatggagatgtgataatttcaggaaacaaaaatttgtgctatgcaaatacaataaactggaaaaaactgtttgggacctccggtcagaaaaccaaaattataagcaacagaggtgaaaacagctgcaaggccacaggccaggtctgccatgccttgtgctcccccgagggctgctggggcccggagcccagggactgcgtctcttgccggaatgtcagccgaggcagggaatgcgtggacaagtgcaaccttctggagggtgagccaagggagtttgtggagaactctgagtgcatacagtgccacccagagtgcctgcctcaggccatgaacatcacctgcacaggacggggaccagacaactgtatccagtgtgcccactacattgacggcccccactgcgtcaagacctgcccggcaggagtcatgggagaaaacaacaccctggtctggaagtacgcagacgccggccatgtgtgccacctgtgccatccaaactgcacctacggatgcactgggccaggtcttgaaggctgtccaacgaatgggcctaagatcccgtccatcgccactgggatggtgggggccctcctcttgctgctggtggtggccctggggatcggcctcttcatgtgagcggccgcgtcgac

SEQ ID NO: 72 - protein, 1103 aa, Homo sapiens
  MISC_FEATURE: NK19-7b Protein
MALPVTALLLPLALLLHAARPDYKDDDDKGGGGSGGGGSDIQMTQTTSSLSASLGDRVTISCRASQDISKYLNWYQQKPDGTVKLLIYHTSRLHSGVPSRFSGSGSGTDYSLTISNLEQEDIATYFCQQGNTLPYTFGGGTKLEITGGGGSGGGGSGGGGSEVKLQESGPGLVAPSQSLSVTCTVSGVSLPDYGVSWIRQPPRKGLEWLGVIWGSETTYYNSALKSRLTIIKDNSKSQVFLKMNSLQTDDTAIYYCAKHYYYGGSYAMDYWGQGTSVTVSSTTTPAPRPPTPAPTIASQPLSLRPEACRPAAGGAVHTRGLDFACDIYIWAPLAGTCGVLLLSLVITLYCRRDQRLPPDAHKPPGGGSFRTPIQEEQADAHSTLAKIRVKFSRSADAPAYQQGQNQLYNELNLGRREEYDVLDKRRGRDPEMGGKPRRKNPQEGLYNELQKDKMAEAYSEIGMKGERRRGKGHDGLYQGLSTATKDTYDALHMQALPPRGSGEGRGSLLTCGDVEENPGPMALPVTALLLPLALLLHAARPNWVNVISDLKKIEDLIQSMHIDATLYTESDVHPSCKVTAMKCFLLELQVISLESGDASIHDTVENLIILANNSLSSNGNVTESGCKECEELEEKNIKEFLQSFVHIVQMFINTSTTTPAPRPPTPAPTIASQPLSLRPEACRPAAGGAVHTRGLDFACDIYIWAPLAGTCGVLLLSLVITLYCGSGATNFSLLKQAGDVEENPGPMLLLVTSLLLCELPHPAFLLIPRKVCNGIGIGEFKDSLSINATNIKHFKNCTSISGDLHILPVAFRGDSFTHTPPLDPQELDILKTVKEITGFLLIQAWPENRTDLHAFENLEIIRGRTKQHGQFSLAVVSLNITSLGLRSLKEISDGDVIISGNKNLCYANTINWKKLFGTSGQKTKIISNRGENSCKATGQVCHALCSPEGCWGPEPRDCVSCRNVSRGRECVDKCNLLEGEPREFVENSECIQCHPECLPQAMNITCTGRGPDNCIQCAHYIDGPHCVKTCPAGVMGENNTLVWKYADAGHVCHLCHPNCTYGCTGPGLEGCPTNGPKIPSIATGMVGALLLLLVVALGIGLFM

SEQ ID NO: 73 - DNA, 1844 bp, Homo sapiens
  misc_feature: NK19-8b DNA
ggatccgaattcgccgccaccatggccttaccagtgaccgccttgctcctgccgctggccttgctgctccacgccgccaggccggactacaaagacgatgacgataaaggcggtggtggctctggtggtggcggcagcgaggtgaaactgcaggagtcaggacctggcctggtggcgccctcacagagcctgtccgtcacatgcactgtctcaggggtctcattacccgactatggtgtaagctggattcgccagcctccacgaaagggtctggagtggctgggagtaatatggggtagtgaaaccacatactataattcagctctcaaatccagactgaccatcatcaaggacaactccaagagccaagttttcttaaaaatgaacagtctgcaaactgatgacacagccatttactactgtgccaaacattattactacggtggtagctatgctatggactactggggccaaggaacctcagtcaccgtctcctcaaccacgacgccagcgccgcgaccaccaacaccggcgcccaccatcgcgtcgcagcccctgtccctgcgcccagaggcgtgccggccagcggcggggggcgcagtgcacacgagggggctggacttcgcctgtgatatctacatctgggcgcccttggccgggacttgtggggtccttctcctgtcactggttatcaccctttactgccggagggaccagaggctgccccccgatgcccacaagccccctgggggaggcagtttccggacccccatccaagaggagcaggccgacgcccactccaccctggccaagatcagagtgaagttcagcaggagcgcagacgcccccgcgtaccagcagggccagaaccagctctataacgagctcaatctaggacgaagagaggagtacgatgttttggacaagagacgtggccgggaccctgagatggggggaaagccgagaaggaagaaccctcaggaaggcctgtacaatgaactgcagaaagataagatggcggaggcctacagtgagattgggatgaaaggcgagcgccggaggggcaaggggcacgatggcctttaccagggtctcagtacagccaccaaggacacctacgacgcccttcacatgcaggccctgccccctcgcggctctggcgagggaaggggttccctgcttacttgcggcgacgtcgaagagaatcccggtccgatggccctcccagtaactgccctccttttgcccctcgcactccttcttcatgccgctcgccccaactgggtcaacgtgattagcgatttgaagaaaatcgaggaccttatacagtctatgcatattgacgctacactgtatactgagagtgatgtacacccgtcctgtaaggtaacggccatgaaatgctttcttctggagctccaggtcatcagcttggagtctggggacgcaagcatccacgatacggttgaaaacctcatcatccttgcgaacaactctctctcatctaatggaaacgttacagagagtgggtgtaaggagtgcgaagagttggaagaaaaaaacatcaaagaatttcttcaatccttcgttcacatagtgcaaatgttcattaacacgtccactaccacacccgccccgaggccacctacgccggcaccgactatcgccagtcaacccctctctctgcgccccgaggcttgccggcctgcggctggtggggcggtccacacccggggcctggattttgcgtgcgatatatacatctgggcacctcttgccggcacctgcggagtgctgcttctctcactcgttattacgctgtactgctaagcggccgcgtcgac

SEQ ID NO: 74 - protein, 602 aa, Homo sapiens
  MISC_FEATURE: NK19-8b Protein
MALPVTALLLPLALLLHAARPDYKDDDDKGGGGSGGGGSEVKLQESGPGLVAPSQSLSVTCTVSGVSLPDYGVSWIRQPPRKGLEWLGVIWGSETTYYNSALKSRLTIIKDNSKSQVFLKMNSLQTDDTAIYYCAKHYYYGGSYAMDYWGQGTSVTVSSTTTPAPRPPTPAPTIASQPLSLRPEACRPAAGGAVHTRGLDFACDIYIWAPLAGTCGVLLLSLVITLYCRRDQRLPPDAHKPPGGGSFRTPIQEEQADAHSTLAKIRVKFSRSADAPAYQQGQNQLYNELNLGRREEYDVLDKRRGRDPEMGGKPRRKNPQEGLYNELQKDKMAEAYSEIGMKGERRRGKGHDGLYQGLSTATKDTYDALHMQALPPRGSGEGRGSLLTCGDVEENPGPMALPVTALLLPLALLLHAARPNWVNVISDLKKIEDLIQSMHIDATLYTESDVHPSCKVTAMKCFLLELQVISLESGDASIHDTVENLIILANNSLSSNGNVTESGCKECEELEEKNIKEFLQSFVHIVQMFINTSTTTPAPRPPTPAPTIASQPLSLRPEACRPAAGGAVHTRGLDFACDIYIWAPLAGTCGVLLLSLVITLYC

SEQ ID NO: 75 - DNA, 2243 bp, Homo sapiens
  misc_feature: NK19-9b DNA
ggatccgaattcgccgccaccatggccttaccagtgaccgccttgctcctgccgctggccttgctgctccacgccgccaggccggactacaaagacgatgacgataaaggcggtggtggctctggtggtggcggcagcgacatccagatgacacagactacatcctccctgtctgcctctctgggagacagagtcaccatcagttgcagggcaagtcaggacattagtaaatatttaaattggtatcagcagaaaccagatggaactgttaaactcctgatctaccatacatcaagattacactcaggagtcccatcaaggttcagtggcagtgggtctggaacagattattctctcaccattagcaacctggagcaagaagatattgccacttacttttgccaacagggtaatacgcttccgtacacgttcggaggggggaccaagctggagatcacaggtggcggtggctcgggcggtggtgggtcgggtggcggcggatctgaggtgaaactgcaggagtcaggacctggcctggtggcgccctcacagagcctgtccgtcacatgcactgtctcaggggtctcattacccgactatggtgtaagctggattcgccagcctccacgaaagggtctggagtggctgggagtaatatggggtagtgaaaccacatactataattcagctctcaaatccagactgaccatcatcaaggacaactccaagagccaagttttcttaaaaatgaacagtctgcaaactgatgacacagccatttactactgtgccaaacattattactacggtggtagctatgctatggactactggggccaaggaacctcagtcaccgtctcctcaaccacgacgccagcgccgcgaccaccaacaccggcgcccaccatcgcgtcgcagcccctgtccctgcgcccagaggcgtgccggccagcggcggggggcgcagtgcacacgagggggctggacttcgcctgtgatatctacatctgggcgcccttggccgggacttgtggggtccttctcctgtcactggttatcaccctttactgccaacgaaggaaatatagatcaaacaaaggagaaagtcctgtggagcctgcagagccttgtcgttacagctgccccagggaggaggagggcagcaccatccccatccaggaggattaccgaaaaccggagcctgcctgctcccccagagtgaagttcagcaggagcgcagacgcccccgcgtaccagcagggccagaaccagctctataacgagctcaatctaggacgaagagaggagtacgatgttttggacaagagacgtggccgggaccctgagatggggggaaagccgagaaggaagaaccctcaggaaggcctgtacaatgaactgcagaaagataagatggcggaggcctacagtgagattgggatgaaaggcgagcgccggaggggcaaggggcacgatggcctttaccagggtctcagtacagccaccaaggacacctacgacgcccttcacatgcaggccctgccccctcgcggctctggcgagggaaggggttccctgcttacttgcggcgacgtcgaagagaatcccggtccgatggccctcccagtaactgccctccttttgcccctcgcactccttcttcatgccgctcgccccaactgggtcaacgtgattagcgatttgaagaaaatcgaggaccttatacagtctatgcatattgacgctacactgtatactgagagtgatgtacacccgtcctgtaaggtaacggccatgaaatgctttcttctggagctccaggtcatcagcttggagtctggggacgcaagcatccacgatacggttgaaaacctcatcatccttgcgaacaactctctctcatctaatggaaacgttacagagagtgggtgtaaggagtgcgaagagttggaagaaaaaaacatcaaagaatttcttcaatccttcgttcacatagtgcaaatgttcattaacacgtccactaccacacccgccccgaggccacctacgccggcaccgactatcgccagtcaacccctctctctgcgccccgaggcttgccggcctgcggctggtggggcggtccacacccggggcctggattttgcgtgcgatatatacatctgggcacctcttgccggcacctgcggagtgctgcttctctcactcgttattacgctgtactgctaagcggccgcgtcgac

SEQ ID NO: 76 - protein, 735 aa, Homo sapiens
  MISC_FEATURE: NK19-9b Protein
MALPVTALLLPLALLLHAARPDYKDDDDKGGGGSGGGGSDIQMTQTTSSLSASLGDRVTISCRASQDISKYLNWYQQKPDGTVKLLIYHTSRLHSGVPSRFSGSGSGTDYSLTISNLEQEDIATYFCQQGNTLPYTFGGGTKLEITGGGGSGGGGSGGGGSEVKLQESGPGLVAPSQSLSVTCTVSGVSLPDYGVSWIRQPPRKGLEWLGVIWGSETTYYNSALKSRLTIIKDNSKSQVFLKMNSLQTDDTAIYYCAKHYYYGGSYAMDYWGQGTSVTVSSTTTPAPRPPTPAPTIASQPLSLRPEACRPAAGGAVHTRGLDFACDIYIWAPLAGTCGVLLLSLVITLYCQRRKYRSNKGESPVEPAEPCRYSCPREEEGSTIPIQEDYRKPEPACSPRVKFSRSADAPAYQQGQNQLYNELNLGRREEYDVLDKRRGRDPEMGGKPRRKNPQEGLYNELQKDKMAEAYSEIGMKGERRRGKGHDGLYQGLSTATKDTYDALHMQALPPRGSGEGRGSLLTCGDVEENPGPMALPVTALLLPLALLLHAARPNWVNVISDLKKIEDLIQSMHIDATLYTESDVHPSCKVTAMKCFLLELQVISLESGDASIHDTVENLIILANNSLSSNGNVTESGCKECEELEEKNIKEFLQSFVHIVQMFINTSTTTPAPRPPTPAPTIASQPLSLRPEACRPAAGGAVHTRGLDFACDIYIWAPLAGTCGVLLLSLVITLYC

SEQ ID NO: 77 - DNA, 2150 bp, Homo sapiens
  misc_feature: NK19-10b DNA
ggatccgaattcgccgccaccatggccttaccagtgaccgccttgctcctgccgctggccttgctgctccacgccgccaggccggactacaaagacgatgacgataaaggcggtggtggctctggtggtggcggcagcgacatccagatgacacagactacatcctccctgtctgcctctctgggagacagagtcaccatcagttgcagggcaagtcaggacattagtaaatatttaaattggtatcagcagaaaccagatggaactgttaaactcctgatctaccatacatcaagattacactcaggagtcccatcaaggttcagtggcagtgggtctggaacagattattctctcaccattagcaacctggagcaagaagatattgccacttacttttgccaacagggtaatacgcttccgtacacgttcggaggggggaccaagctggagatcacaggtggcggtggctcgggcggtggtgggtcgggtggcggcggatctgaggtgaaactgcaggagtcaggacctggcctggtggcgccctcacagagcctgtccgtcacatgcactgtctcaggggtctcattacccgactatggtgtaagctggattcgccagcctccacgaaagggtctggagtggctgggagtaatatggggtagtgaaaccacatactataattcagctctcaaatccagactgaccatcatcaaggacaactccaagagccaagttttcttaaaaatgaacagtctgcaaactgatgacacagccatttactactgtgccaaacattattactacggtggtagctatgctatggactactggggccaaggaacctcagtcaccgtctcctcaaccacgacgccagcgccgcgaccaccaacaccggcgcccaccatcgcgtcgcagcccctgtccctgcgcccagaggcgtgccggccagcggcggggggcgcagtgcacacgagggggctggacttcgcctgtgatatctacatctgggcgcccttggccgggacttgtggggtccttctcctgtcactggttatcaccctttactgcatgccggaggagggttcgggctgctcggtgcggcgcaggccctatgggtgcagagtgaagttcagcaggagcgcagacgcccccgcgtaccagcagggccagaaccagctctataacgagctcaatctaggacgaagagaggagtacgatgttttggacaagagacgtggccgggaccctgagatggggggaaagccgagaaggaagaaccctcaggaaggcctgtacaatgaactgcagaaagataagatggcggaggcctacagtgagattgggatgaaaggcgagcgccggaggggcaaggggcacgatggcctttaccagggtctcagtacagccaccaaggacacctacgacgcccttcacatgcaggccctgccccctcgcggctctggcgagggaaggggttccctgcttacttgcggcgacgtcgaagagaatcccggtccgatggccctcccagtaactgccctccttttgcccctcgcactccttcttcatgccgctcgccccaactgggtcaacgtgattagcgatttgaagaaaatcgaggaccttatacagtctatgcatattgacgctacactgtatactgagagtgatgtacacccgtcctgtaaggtaacggccatgaaatgctttcttctggagctccaggtcatcagcttggagtctggggacgcaagcatccacgatacggttgaaaacctcatcatccttgcgaacaactctctctcatctaatggaaacgttacagagagtgggtgtaaggagtgcgaagagttggaagaaaaaaacatcaaagaatttcttcaatccttcgttcacatagtgcaaatgttcattaacacgtccactaccacacccgccccgaggccacctacgccggcaccgactatcgccagtcaacccctctctctgcgccccgaggcttgccggcctgcggctggtggggcggtccacacccggggcctggattttgcgtgcgatatatacatctgggcacctcttgccggcacctgcggagtgctgcttctctcactcgttattacgctgtactgctaagcggccgcgtcgac

SEQ ID NO: 78 - protein, 704 aa, Homo sapiens
  MISC_FEATURE: NK19-10b Protein
MALPVTALLLPLALLLHAARPDYKDDDDKGGGGSGGGGSDIQMTQTTSSLSASLGDRVTISCRASQDISKYLNWYQQKPDGTVKLLIYHTSRLHSGVPSRFSGSGSGTDYSLTISNLEQEDIATYFCQQGNTLPYTFGGGTKLEITGGGGSGGGGSGGGGSEVKLQESGPGLVAPSQSLSVTCTVSGVSLPDYGVSWIRQPPRKGLEWLGVIWGSETTYYNSALKSRLTIIKDNSKSQVFLKMNSLQTDDTAIYYCAKHYYYGGSYAMDYWGQGTSVTVSSTTTPAPRPPTPAPTIASQPLSLRPEACRPAAGGAVHTRGLDFACDIYIWAPLAGTCGVLLLSLVITLYCMPEEGSGCSVRRRPYGCRVKFSRSADAPAYQQGQNQLYNELNLGRREEYDVLDKRRGRDPEMGGKPRRKNPQEGLYNELQKDKMAEAYSEIGMKGERRRGKGHDGLYQGLSTATKDTYDALHMQALPPRGSGEGRGSLLTCGDVEENPGPMALPVTALLLPLALLLHAARPNWVNVISDLKKIEDLIQSMHIDATLYTESDVHPSCKVTAMKCFLLELQVISLESGDASIHDTVENLIILANNSLSSNGNVTESGCKECEELEEKNIKEFLQSFVHIVQMFINTSTTTPAPRPPTPAPTIASQPLSLRPEACRPAAGGAVHTRGLDFACDIYIWAPLAGTCGVLLLSLVITLYC

SEQ ID NO: 79 - DNA, 2234 bp, Homo sapiens
  misc_feature: NK19-11b DNA
ggatccgaattcgccgccaccatggccttaccagtgaccgccttgctcctgccgctggccttgctgctccacgccgccaggccggactacaaagacgatgacgataaaggcggtggtggctctggtggtggcggcagcgacatccagatgacacagactacatcctccctgtctgcctctctgggagacagagtcaccatcagttgcagggcaagtcaggacattagtaaatatttaaattggtatcagcagaaaccagatggaactgttaaactcctgatctaccatacatcaagattacactcaggagtcccatcaaggttcagtggcagtgggtctggaacagattattctctcaccattagcaacctggagcaagaagatattgccacttacttttgccaacagggtaatacgcttccgtacacgttcggaggggggaccaagctggagatcacaggtggcggtggctcgggcggtggtgggtcgggtggcggcggatctgaggtgaaactgcaggagtcaggacctggcctggtggcgccctcacagagcctgtccgtcacatgcactgtctcaggggtctcattacccgactatggtgtaagctggattcgccagcctccacgaaagggtctggagtggctgggagtaatatggggtagtgaaaccacatactataattcagctctcaaatccagactgaccatcatcaaggacaactccaagagccaagttttcttaaaaatgaacagtctgcaaactgatgacacagccatttactactgtgccaaacattattactacggtggtagctatgctatggactactggggccaaggaacctcagtcaccgtctcctcaaccacgacgccagcgccgcgaccaccaacaccggcgcccaccatcgcgtcgcagcccctgtccctgcgcccagaggcgtgccggccagcggcggggggcgcagtgcacacgagggggctggacttcgcctgtgatatctacatctgggcgcccttggccgggacttgtggggtccttctcctgtcactggttatcaccctttactgcatggaccaacaagcaatatatgctgagttaaacttacccacagactcaggcccagaaagttcttcaccttcatctcttcctcgggatgtctgtcagggttcaccttggcatcaatttgccctgaaacttagctgtagagtgaagttcagcaggagcgcagacgcccccgcgtaccagcagggccagaaccagctctataacgagctcaatctaggacgaagagaggagtacgatgttttggacaagagacgtggccgggaccctgagatggggggaaagccgagaaggaagaaccctcaggaaggcctgtacaatgaactgcagaaagataagatggcggaggcctacagtgagattgggatgaaaggcgagcgccggaggggcaaggggcacgatggcctttaccagggtctcagtacagccaccaaggacacctacgacgcccttcacatgcaggccctgccccctcgcggctctggcgagggaaggggttccctgcttacttgcggcgacgtcgaagagaatcccggtccgatggccctcccagtaactgccctccttttgcccctcgcactccttcttcatgccgctcgccccaactgggtcaacgtgattagcgatttgaagaaaatcgaggaccttatacagtctatgcatattgacgctacactgtatactgagagtgatgtacacccgtcctgtaaggtaacggccatgaaatgctttcttctggagctccaggtcatcagcttggagtctggggacgcaagcatccacgatacggttgaaaacctcatcatccttgcgaacaactctctctcatctaatggaaacgttacagagagtgggtgtaaggagtgcgaagagttggaagaaaaaaacatcaaagaatttcttcaatccttcgttcacatagtgcaaatgttcattaacacgtccactaccacacccgccccgaggccacctacgccggcaccgactatcgccagtcaacccctctctctgcgccccgaggcttgccggcctgcggctggtggggcggtccacacccggggcctggattttgcgtgcgatatatacatctgggcacctcttgccggcacctgcggagtgctgcttctctcactcgttattacgctgtactgctaagcggccgcgtcgac

SEQ ID NO: 80 - protein, 732 aa, Homo sapiens
  MISC_FEATURE: NK19-11b Protein
MALPVTALLLPLALLLHAARPDYKDDDDKGGGGSGGGGSDIQMTQTTSSLSASLGDRVTISCRASQDISKYLNWYQQKPDGTVKLLIYHTSRLHSGVPSRFSGSGSGTDYSLTISNLEQEDIATYFCQQGNTLPYTFGGGTKLEITGGGGSGGGGSGGGGSEVKLQESGPGLVAPSQSLSVTCTVSGVSLPDYGVSWIRQPPRKGLEWLGVIWGSETTYYNSALKSRLTIIKDNSKSQVFLKMNSLQTDDTAIYYCAKHYYYGGSYAMDYWGQGTSVTVSSTTTPAPRPPTPAPTIASQPLSLRPEACRPAAGGAVHTRGLDFACDIYIWAPLAGTCGVLLLSLVITLYCMDQQAIYAELNLPTDSGPESSSPSSLPRDVCQGSPWHQFALKLSCRVKFSRSADAPAYQQGQNQLYNELNLGRREEYDVLDKRRGRDPEMGGKPRRKNPQEGLYNELQKDKMAEAYSEIGMKGERRRGKGHDGLYQGLSTATKDTYDALHMQALPPRGSGEGRGSLLTCGDVEENPGPMALPVTALLLPLALLLHAARPNWVNVISDLKKIEDLIQSMHIDATLYTESDVHPSCKVTAMKCFLLELQVISLESGDASIHDTVENLIILANNSLSSNGNVTESGCKECEELEEKNIKEFLQSFVHIVQMFINTSTTTPAPRPPTPAPTIASQPLSLRPEACRPAAGGAVHTRGLDFACDIYIWAPLAGTCGVLLLSLVITLYC

SEQ ID NO: 81 - DNA, 2165 bp, Homo sapiens
  misc_feature: NK19-12b DNA
ggatccgaattcgccgccaccatggccttaccagtgaccgccttgctcctgccgctggccttgctgctccacgccgccaggccggactacaaagacgatgacgataaaggcggtggtggctctggtggtggcggcagcgacatccagatgacacagactacatcctccctgtctgcctctctgggagacagagtcaccatcagttgcagggcaagtcaggacattagtaaatatttaaattggtatcagcagaaaccagatggaactgttaaactcctgatctaccatacatcaagattacactcaggagtcccatcaaggttcagtggcagtgggtctggaacagattattctctcaccattagcaacctggagcaagaagatattgccacttacttttgccaacagggtaatacgcttccgtacacgttcggaggggggaccaagctggagatcacaggtggcggtggctcgggcggtggtgggtcgggtggcggcggatctgaggtgaaactgcaggagtcaggacctggcctggtggcgccctcacagagcctgtccgtcacatgcactgtctcaggggtctcattacccgactatggtgtaagctggattcgccagcctccacgaaagggtctggagtggctgggagtaatatggggtagtgaaaccacatactataattcagctctcaaatccagactgaccatcatcaaggacaactccaagagccaagttttcttaaaaatgaacagtctgcaaactgatgacacagccatttactactgtgccaaacattattactacggtggtagctatgctatggactactggggccaaggaacctcagtcaccgtctcctcaaccacgacgccagcgccgcgaccaccaacaccggcgcccaccatcgcgtcgcagcccctgtccctgcgcccagaggcgtgccggccagcggcggggggcgcagtgcacacgagggggctggacttcgcctgtgatatctacatctgggcgcccttggccgggacttgtggggtccttctcctgtcactggttatcaccctttactgcatgatcgaaacatacaaccaaacttctccccgatctgcggccactggactgcccatcagcatgaaaagagtgaagttcagcaggagcgcagacgcccccgcgtaccagcagggccagaaccagctctataacgagctcaatctaggacgaagagaggagtacgatgttttggacaagagacgtggccgggaccctgagatggggggaaagccgagaaggaagaaccctcaggaaggcctgtacaatgaactgcagaaagataagatggcggaggcctacagtgagattgggatgaaaggcgagcgccggaggggcaaggggcacgatggcctttaccagggtctcagtacagccaccaaggacacctacgacgcccttcacatgcaggccctgccccctcgcggctctggcgagggaaggggttccctgcttacttgcggcgacgtcgaagagaatcccggtccgatggccctcccagtaactgccctccttttgcccctcgcactccttcttcatgccgctcgccccaactgggtcaacgtgattagcgatttgaagaaaatcgaggaccttatacagtctatgcatattgacgctacactgtatactgagagtgatgtacacccgtcctgtaaggtaacggccatgaaatgctttcttctggagctccaggtcatcagcttggagtctggggacgcaagcatccacgatacggttgaaaacctcatcatccttgcgaacaactctctctcatctaatggaaacgttacagagagtgggtgtaaggagtgcgaagagttggaagaaaaaaacatcaaagaatttcttcaatccttcgttcacatagtgcaaatgttcattaacacgtccactaccacacccgccccgaggccacctacgccggcaccgactatcgccagtcaacccctctctctgcgccccgaggcttgccggcctgcggctggtggggcggtccacacccggggcctggattttgcgtgcgatatatacatctgggcacctcttgccggcacctgcggagtgctgcttctctcactcgttattacgctgtactgctaagcggccgcgtcgac

SEQ ID NO: 82 - protein, 709 aa, Homo sapiens
  MISC_FEATURE: NK19-12b Protein
MALPVTALLLPLALLLHAARPDYKDDDDKGGGGSGGGGSDIQMTQTTSSLSASLGDRVTISCRASQDISKYLNWYQQKPDGTVKLLIYHTSRLHSGVPSRFSGSGSGTDYSLTISNLEQEDIATYFCQQGNTLPYTFGGGTKLEITGGGGSGGGGSGGGGSEVKLQESGPGLVAPSQSLSVTCTVSGVSLPDYGVSWIRQPPRKGLEWLGVIWGSETTYYNSALKSRLTIIKDNSKSQVFLKMNSLQTDDTAIYYCAKHYYYGGSYAMDYWGQGTSVTVSSTTTPAPRPPTPAPTIASQPLSLRPEACRPAAGGAVHTRGLDFACDIYIWAPLAGTCGVLLLSLVITLYCMIETYNQTSPRSAATGLPISMKRVKFSRSADAPAYQQGQNQLYNELNLGRREEYDVLDKRRGRDPEMGGKPRRKNPQEGLYNELQKDKMAEAYSEIGMKGERRRGKGHDGLYQGLSTATKDTYDALHMQALPPRGSGEGRGSLLTCGDVEENPGPMALPVTALLLPLALLLHAARPNWVNVISDLKKIEDLIQSMHIDATLYTESDVHPSCKVTAMKCFLLELQVISLESGDASIHDTVENLIILANNSLSSNGNVTESGCKECEELEEKNIKEFLQSFVHIVQMFINTSTTTPAPRPPTPAPTIASQPLSLRPEACRPAAGGAVHTRGLDFACDIYIWAPLAGTCGVLLLSLVITLYC

SEQ ID NO: 83 - DNA, 2315 bp, Homo sapiens
  misc_feature: NK19-13b DNA
ggatccgaattcgccgccaccatggccttaccagtgaccgccttgctcctgccgctggccttgctgctccacgccgccaggccggactacaaagacgatgacgataaaggcggtggtggctctggtggtggcggcagcgacatccagatgacacagactacatcctccctgtctgcctctctgggagacagagtcaccatcagttgcagggcaagtcaggacattagtaaatatttaaattggtatcagcagaaaccagatggaactgttaaactcctgatctaccatacatcaagattacactcaggagtcccatcaaggttcagtggcagtgggtctggaacagattattctctcaccattagcaacctggagcaagaagatattgccacttacttttgccaacagggtaatacgcttccgtacacgttcggaggggggaccaagctggagatcacaggtggcggtggctcgggcggtggtgggtcgggtggcggcggatctgaggtgaaactgcaggagtcaggacctggcctggtggcgccctcacagagcctgtccgtcacatgcactgtctcaggggtctcattacccgactatggtgtaagctggattcgccagcctccacgaaagggtctggagtggctgggagtaatatggggtagtgaaaccacatactataattcagctctcaaatccagactgaccatcatcaaggacaactccaagagccaagttttcttaaaaatgaacagtctgcaaactgatgacacagccatttactactgtgccaaacattattactacggtggtagctatgctatggactactggggccaaggaacctcagtcaccgtctcctcaaccacgacgccagcgccgcgaccaccaacaccggcgcccaccatcgcgtcgcagcccctgtccctgcgcccagaggcgtgccggccagcggcggggggcgcagtgcacacgagggggctggacttcgcctgtgatatctacatctgggcgcccttggccgggacttgtggggtccttctcctgtcactggttatcaccctttactgcaacagtcgaagaaggtgtgggcagaagaaaaagctagtgatcaacagtggcaatggagctgtggaggacagaaagccaagtggactcaacggagaggccagcaagtctcaggaaatggtgcatttggtgaacaaggagtcgtcagaaactccagaccagtttatgacagctgatgagacaaggaacctgcagaatgtggacatgaagattggggtgagagtgaagttcagcaggagcgcagacgcccccgcgtaccagcagggccagaaccagctctataacgagctcaatctaggacgaagagaggagtacgatgttttggacaagagacgtggccgggaccctgagatggggggaaagccgagaaggaagaaccctcaggaaggcctgtacaatgaactgcagaaagataagatggcggaggcctacagtgagattgggatgaaaggcgagcgccggaggggcaaggggcacgatggcctttaccagggtctcagtacagccaccaaggacacctacgacgcccttcacatgcaggccctgccccctcgcggctctggcgagggaaggggttccctgcttacttgcggcgacgtcgaagagaatcccggtccgatggccctcccagtaactgccctccttttgcccctcgcactccttcttcatgccgctcgccccaactgggtcaacgtgattagcgatttgaagaaaatcgaggaccttatacagtctatgcatattgacgctacactgtatactgagagtgatgtacacccgtcctgtaaggtaacggccatgaaatgctttcttctggagctccaggtcatcagcttggagtctggggacgcaagcatccacgatacggttgaaaacctcatcatccttgcgaacaactctctctcatctaatggaaacgttacagagagtgggtgtaaggagtgcgaagagttggaagaaaaaaacatcaaagaatttcttcaatccttcgttcacatagtgcaaatgttcattaacacgtccactaccacacccgccccgaggccacctacgccggcaccgactatcgccagtcaacccctctctctgcgccccgaggcttgccggcctgcggctggtggggcggtccacacccggggcctggattttgcgtgcgatatatacatctgggcacctcttgccggcacctgcggagtgctgcttctctcactcgttattacgctgtactgctaagcggccgcgtcgac

SEQ ID NO: 84 - protein, 759 aa, Homo sapiens
  MISC_FEATURE: NK19-13b Protein
MALPVTALLLPLALLLHAARPDYKDDDDKGGGGSGGGGSDIQMTQTTSSLSASLGDRVTISCRASQDISKYLNWYQQKPDGTVKLLIYHTSRLHSGVPSRFSGSGSGTDYSLTISNLEQEDIATYFCQQGNTLPYTFGGGTKLEITGGGGSGGGGSGGGGSEVKLQESGPGLVAPSQSLSVTCTVSGVSLPDYGVSWIRQPPRKGLEWLGVIWGSETTYYNSALKSRLTIIKDNSKSQVFLKMNSLQTDDTAIYYCAKHYYYGGSYAMDYWGQGTSVTVSSTTTPAPRPPTPAPTIASQPLSLRPEACRPAAGGAVHTRGLDFACDIYIWAPLAGTCGVLLLSLVITLYCNSRRRCGQKKKLVINSGNGAVEDRKPSGLNGEASKSQEMVHLVNKESSETPDQFMTADETRNLQNVDMKIGVRVKFSRSADAPAYQQGQNQLYNELNLGRREEYDVLDKRRGRDPEMGGKPRRKNPQEGLYNELQKDKMAEAYSEIGMKGERRRGKGHDGLYQGLSTATKDTYDALHMQALPPRGSGEGRGSLLTCGDVEENPGPMALPVTALLLPLALLLHAARPNWVNVISDLKKIEDLIQSMHIDATLYTESDVHPSCKVTAMKCFLLELQVISLESGDASIHDTVENLIILANNSLSSNGNVTESGCKECEELEEKNIKEFLQSFVHIVQMFINTSTTTPAPRPPTPAPTIASQPLSLRPEACRPAAGGAVHTRGLDFACDIYIWAPLAGTCGVLLLSLVITLYC

SEQ ID NO: 85 - DNA, 6488 bp, Homo sapiens
  misc_feature: NK19 DNA
atgaaagaccccacctgtaggtttggcaagctagcttaagtaacgccattttgcaaggcatggaaaatacataactgagaatagagaagttcagatcaaggttaggaacagagagacagcagaatatgggccaaacaggatatctgtggtaagcagttcctgccccggctcagggccaagaacagatggtccccagatgcggtcccgccctcagcagtttctagagaaccatcagatgtttccagggtgccccaaggacctgaaatgaccctgtgccttatttgaactaaccaatcagttcgcttctcgcttctgttcgcgcgcttctgctccccgagctcaataaaagagcccacaacccctcactcggcgcgccagtcctccgatagactgcgtcgcccgggtacccgtattcccaataaagcctcttgctgtttgcatccgaatcgtggactcgctgatccttgggagggtctcctcagattgattgactgcccacctcgggggtctttcatttggaggttccaccgagatttggagacccctgcccagggaccaccgacccccccgccgggaggtaagctggccagcggtcgtttcgtgtctgtctctgtctttgtgcgtgtttgtgccggcatctaatgtttgcgcctgcgtctgtactagttagctaactagctctgtatctggcggacccgtggtggaactgacgagttctgaacacccggccgcaaccctgggagacgtcccagggactttgggggccgtttttgtggcccgacctgaggaagggagtcgatgtggaatccgaccccgtcaggatatgtggttctggtaggagacgagaacctaaaacagttcccgcctccgtctgaatttttgctttcggtttggaaccgaagccgcgcgtcttgtctgctgcagcgctgcagcatcgttctgtgttgtctctgtctgactgtgtttctgtatttgtctgaaaattagggccagactgttaccactcccttaagtttgaccttaggtcactggaaagatgtcgagcggatcgctcacaaccagtcggtagatgtcaagaagagacgttgggttaccttctgctctgcagaatggccaacctttaacgtcggatggccgcgagacggcacctttaaccgagacctcatcacccaggttaagatcaaggtcttttcacctggcccgcatggacacccagaccaggtcccctacatcgtgacctgggaagccttggcttttgacccccctccctgggtcaagccctttgtacaccctaagcctccgcctcctcttcctccatccgccccgtctctcccccttgaacctcctcgttcgaccccgcctcgatcctccctttatccagccctcactccttctctaggcgccggaattcgttaacctcgagcgggatcaattccgccccccccctaacgttactggccgaagccgcttggaataaggccggtgtgcgtttgtctatatgttattttccaccatattgccgtcttttggcaatgtgagggcccggaaacctggccctgtcttcttgacgagcattcctaggggtctttcccctctcgccaaaggaatgcaaggtctgttgaatgtcgtgaaggaagcagttcctctggaagcttcttgaagacaaacaacgtctgtagcgaccctttgcaggcagcggaaccccccacctggcgacaggtgcctctgcggccaaaagccacgtgtataagatacacctgcaaaggcggcacaaccccagtgccacgttgtgagttggatagttgtggaaagagtcaaatggctctcctcaagcgtattcaacaaggggctgaaggatgcccagaaggtaccccattgtatgggatctgatctggggcctcggtgcacatgctttacatgtgtttagtcgaggttaaaaaaacgtctaggccccccgaaccacggggacgtggttttcctttgaaaaacacgataataccatggtgagcaagggcgaggagctgttcaccggggtggtgcccatcctggtcgagctggacggcgacgtaaacggccacaagttcagcgtgtccggcgagggcgagggcgatgccacctacggcaagctgaccctgaagttcatctgcaccaccggcaagctgcccgtgccctggcccaccctcgtgaccaccctgacctacggcgtgcagtgcttcagccgctaccccgaccacatgaagcagcacgacttcttcaagtccgccatgcccgaaggctacgtccaggagcgcaccatcttcttcaaggacgacggcaactacaagacccgcgccgaggtgaagttcgagggcgacaccctggtgaaccgcatcgagctgaagggcatcgacttcaaggaggacggcaacatcctggggcacaagctggagtacaactacaacagccacaacgtctatatcatggccgacaagcagaagaacggcatcaaggtgaacttcaagatccgccacaacatcgaggacggcagcgtgcagctcgccgaccactaccagcagaacacccccatcggcgacggccccgtgctgctgcccgacaaccactacctgagcacccagtccgccctgagcaaagaccccaacgagaagcgcgatcacatggtcctgctggagttcgtgaccgccgccgggatcactctcggcatggacgagctgtacaagtaaagcggccgcgactctagagtcgacctgcaggcatgcaagcttcaggtagccggctaacgttaacaaccggtacctctagaactatagctagcatgcgcaaatttaaagcgctgatatcgataaaataaaagattttatttagtctccagaaaaaggggggaatgaaagaccccacctgtaggtttggcaagctagcttaagtaacgccattttgcaaggcatggaaaatacataactgagaatagagaagttcagatcaaggttaggaacagagagacagcagaatatgggccaaacaggatatctgtggtaagcagttcctgccccggctcagggccaagaacagatggtccccagatgcggtcccgccctcagcagtttctagagaaccatcagatgtttccagggtgccccaaggacctgaaatgaccctgtgccttatttgaactaaccaatcagttcgcttctcgcttctgttcgcgcgcttctgctccccgagctcaataaaagagcccacaacccctcactcggcgcgccagtcctccgatagactgcgtcgcccgggtacccgtgtatccaataaaccctcttgcagttgcatccgacttgtggtctcgctgttccttgggagggtctcctctgagtgattgactacccgtcagcgggggtctttcatgggtaacagtttcttgaagttggagaacaacattctgagggtaggagtcgaatattaagtaatcctgactcaattagccactgttttgaatccacatactccaatactcctgaaatagttcattatggacagcgcagaaagagctggggagaattgtgaaattgttatccgctcacaattccacacaacatacgagccggaagcataaagtgtaaagcctggggtgcctaatgagtgagctaactcacattaattgcgttgcgctcactgcccgctttccagtcgggaaacctgtcgtgccagctgcattaatgaatcggccaacgcgcggggagaggcggtttgcgtattgggcgctcttccgcttcctcgctcactgactcgctgcgctcggtcgttcggctgcggcgagcggtatcagctcactcaaaggcggtaatacggttatccacagaatcaggggataacgcaggaaagaacatgtgagcaaaaggccagcaaaaggccaggaaccgtaaaaaggccgcgttgctggcgtttttccataggctccgcccccctgacgagcatcacaaaaatcgacgctcaagtcagaggtggcgaaacccgacaggactataaagataccaggcgtttccccctggaagctccctcgtgcgctctcctgttccgaccctgccgcttaccggatacctgtccgcctttctcccttcgggaagcgtggcgctttctcatagctcacgctgtaggtatctcagttcggtgtaggtcgttcgctccaagctgggctgtgtgcacgaaccccccgttcagcccgaccgctgcgccttatccggtaactatcgtcttgagtccaacccggtaagacacgacttatcgccactggcagcagccactggtaacaggattagcagagcgaggtatgtaggcggtgctacagagttcttgaagtggtggcctaactacggctacactagaagaacagtatttggtatctgcgctctgctgaagccagttaccttcggaaaaagagttggtagctcttgatccggcaaacaaaccaccgctggtagcggtggtttttttgtttgcaagcagcagattacgcgcagaaaaaaaggatctcaagaagatcctttgatcttttctacggggtctgacgctcagtggaacgaaaactcacgttaagggattttggtcatgagattatcaaaaaggatcttcacctagatccttttaaattaaaaatgaagttttaaatcaatctaaagtatatatgagtaaacttggtctgacagttaccaatgcttaatcagtgaggcacctatctcagcgatctgtctatttcgttcatccatagttgcctgactccccgtcgtgtagataactacgatacgggagggcttaccatctggccccagtgctgcaatgataccgcgagacccacgctcaccggctccagatttatcagcaataaaccagccagccggaagggccgagcgcagaagtggtcctgcaactttatccgcctccatccagtctattaattgttgccgggaagctagagtaagtagttcgccagttaatagtttgcgcaacgttgttgccattgctacaggcatcgtggtgtcacgctcgtcgtttggtatggcttcattcagctccggttcccaacgatcaaggcgagttacatgatcccccatgttgtgcaaaaaagcggttagctccttcggtcctccgatcgttgtcagaagtaagttggccgcagtgttatcactcatggttatggcagcactgcataattctcttactgtcatgccatccgtaagatgcttttctgtgactggtgagtactcaaccaagtcattctgagaatagtgtatgcggcgaccgagttgctcttgcccggcgtcaatacgggataataccgcgccacatagcagaactttaaaagtgctcatcattggaaaacgttcttcggggcgaaaactctcaaggatcttaccgctgttgagatccagttcgatgtaacccactcgtgcacccaactgatcttcagcatcttttactttcaccagcgtttctgggtgagcaaaaacaggaaggcaaaatgccgcaaaaaagggaataagggcgacacggaaatgttgaatactcatactcttcctttttcaatattattgaagcatttatcagggttattgtctcatgagcggatacatatttgaatgtatttagaaaaataaacaaataggggttccgcgcacatttccccgaaaagtgccacctgacgtctaagaaaccattattatcatgacattaacctataaaaataggcgtatcacgaggccctttcgtctcgcgcgtttcggtgatgacggtgaaaacctctgacacatgcagctcccggagacggtcacagcttgtctgtaagcggatgccgggagcagacaagcccgtcagggcgcgtcagcgggtgttggcgggtgtcggggctggcttaactatgcggcatcagagcagattgtactgagagtgcaccatatgcggtgtgaaataccgcacagatgcgtaaggagaaaataccgcatcaggcgccattcgccattcaggctgcgcaactgttgggaagggcgatcggtgcgggcctcttcgctattacgccagctggcgaaagggggatgtgctgcaaggcgattaagttgggtaacgccagggttttcccagtcacgacgttgtaaaacgacggcgcaaggaatggtgcatgcaaggagatggcgcccaacagtcccccggccacggggcctgccaccatacccacgccgaaacaagcgctcatgagcccgaagtggcgagcccgatcttccccatcggtgatgtcggcgatataggcgccagcaaccgcacctgtggcgccggtgatgccggccacgatgcgtccggcgtagaggcgattagtccaatttgttaaagacaggatatcagtggtccaggctctagttttgactcaacaatatcaccagctgaagcctatagagtacgagccatagataaaataaaagattttatttagtctccagaaaaagggggga

SEQ ID NO: 86 - protein, 486 aa, Homo sapiens
  MISC_FEATURE: NK19 PROTEIN
MALPVTALLLPLALLLHAARPDIQMTQTTSSLSASLGDRVTISCRASQDISKYLNWYQQKPDGTVKLLIYHTSRLHSGVPSRFSGSGSGTDYSLTISNLEQEDIATYFCQQGNTLPYTFGGGTKLEITGGGGSGGGGSGGGGSEVKLQESGPGLVAPSQSLSVTCTVSGVSLPDYGVSWIRQPPRKGLEWLGVIWGSETTYYNSALKSRLTIIKDNSKSQVFLKMNSLQTDDTAIYYCAKHYYYGGSYAMDYWGQGTSVTVSSTTTPAPRPPTPAPTIASQPLSLRPEACRPAAGGAVHTRGLDFACDIYIWAPLAGTCGVLLLSLVITLYCKRGRKKLLYIFKQPFMRPVQTTQEEDGCSCRFPEEEEGGCELRVKFSRSADAPAYQQGQNQLYNELNLGRREEYDVLDKRRGRDPEMGGKPRRKNPQEGLYNELQKDKMAEAYSEIGMKGERRRGKGHDGLYQGLSTATKDTYDALHMQALPPR

SEQ ID NO: 87 - DNA, 6488 bp, Homo sapiens; identical to SEQ ID NO: 85
  misc_feature: MSCV-IRES-GFP expression plasmid

SEQ ID NO: 88 - protein, 117 aa, Homo sapiens
  MISC_FEATURE: anti CLDN6 heavy chain
EVQLQQSGPELVKPGASMKISCKASGYSFTGYTMNWVKQSHGKNLEWIGLINPYNGGTIYNQKFKGKATLTVDKSSSTAYMELLSLTSEDSAVYYCARDYGFVLDYWGQGTTLTVSS

SEQ ID NO: 89 - protein, 107 aa, Homo sapiens
  MISC_FEATURE: anti CLDN6 light chain 1
QIVLTQSPAIMSASPGEKVTITCSASSSVSYLHWFQQKPGTSPKLWVYSTSNLPSGVPARFGGSGSGTSYSLTISRMEAEDAATYYCQQRSIYPPWTFGGGTKLEIK

SEQ ID NO: 90 - protein, 107 aa, Homo sapiens
  MISC_FEATURE: anti CLDN6 light chain 2
QIVLTQSPSIMSVSPGEKVTITCSASSSVSYMHWFQQKPGTSPKLGIYSTSNLASGVPARFSGRGSGTSYSLTISRVAAEDAATYYCQQRSNYPPWTFGGGTKLEIK

SEQ ID NO: 91 - protein, 107 aa, Homo sapiens
  MISC_FEATURE: anti CLDN6 light chain 3
QIVLTQSPSIMSVSPGEKVTITCSASSSVSYMHWFQQKPGTSPKLSIYSTSNLASGVPARFSGRGSGTSYSLTISRVAAEDAATYYCQQRSNYPPWTFGGGTKLEIK

SEQ ID NO: 92 - protein, 8 aa, Homo sapiens
  MISC_FEATURE: anti CLDN6 heavy chain CDR1
GYSFTGYT

SEQ ID NO: 93 - protein, 8 aa, Homo sapiens
  MISC_FEATURE: anti CLDN6 heavy chain CDR2
INPYNGGT

SEQ ID NO: 94 - protein, 10 aa, Homo sapiens
  MISC_FEATURE: anti CLDN6 heavy chain CDR3
ARDYGFVLDY

SEQ ID NO: 95 - protein, 5 aa, Homo sapiens
  MISC_FEATURE: anti CLDN6 light chain 1 CDR1
SSVSY

SEQ ID NO: 96 - protein, 3 aa, Homo sapiens
  MISC_FEATURE: anti CLDN6 light chain 1  CDR2
STS

SEQ ID NO: 97 - protein, 8 aa, Homo sapiens
  MISC_FEATURE: anti CLDN6 light chain 1 CDR3
QQRSIYPP

SEQ ID NO: 98 - protein, 5 aa, Homo sapiens
  MISC_FEATURE: anti CLDN6 light chain 2 CDR1
SSVSY

SEQ ID NO: 99 - protein, 3 aa, Homo sapiens
  MISC_FEATURE: anti CLDN6 light chain 2  CDR2
STS

SEQ ID NO: 100 - protein, 8 aa, Homo sapiens
  MISC_FEATURE: anti CLDN6 light chain 2 CDR3
QQRSNYPP

SEQ ID NO: 101 - protein, 5 aa, Homo sapiens
  MISC_FEATURE: anti CLDN6 light chain 3 CDR1
SSVSY

SEQ ID NO: 102 - protein, 3 aa, Homo sapiens
  MISC_FEATURE: anti CLDN6 light chain 3  CDR2
STS

SEQ ID NO: 103 - protein, 8 aa, Homo sapiens
  MISC_FEATURE: anti CLDN6 light chain 3 CDR3
QQRSNYPP

SEQ ID NO: 104 - protein, 120 aa, Homo sapiens
  MISC_FEATURE: anti CD19 heavy chain variable region
QVQLVQSGGGVVQPGRSLRLSCAASGVSLPDYGVSWVRQAPGKGLEWVAVIWGSETTYYNSALKSRFTISRDNSKNTLYLQMNSLRAEDTAVYYCAKHYYYGGSYAMDYWGQGTLVTVSS

SEQ ID NO: 105 - protein, 107 aa, Homo sapiens
  MISC_FEATURE: anti CD19 light chain variable region
DIQMTQSPSSLSASVGDRVTITCRASQDISKYLNWYQQKPGKAIKLLIYHTSRLHSGVPSRFSGSGSGTDFTLTISSLQPEDFATYYCQQGATLPYTFGPGTKVDIK

SEQ ID NO: 106 - protein, 450 aa, Homo sapiens
  MISC_FEATURE: anti CD19 heavy chain variable
QVQLVQSGGGVVQPGRSLRLSCAASGVSLPDYGVSWVRQAPGKGLEWVAVIWGSETTYYNSALKSRFTISRDNSKNTLYLQMNSLRAEDTAVYYCAKHYYYGGSYAMDYWGQGTLVTVSSASTKGPSVFPLAPSSKSTSGGTAALGCLVKDYFPEPVTVSWNSGALTSGVHTFPAVLQSSGLYSLSSVVTVPSSSLGTQTYICNVNHKPSNTKVDKKVEPKSCDKTHTCPPCPAPELLGGPSVFLFPPKPKDTLMISRTPEVTCVVVDVSHEDPEVKFNWYVDGVEVHNAKTKPREEQYNSTYRVVSVLTVLHQDWLNGKEYKCKVSNKALPAPIEKTISKAKGQPREPQVYTLPPSRDELTKNQVSLTCLVKGFYPSDIAVEWESNGQPENNYKTTPPVLDSDGSFFLYSKLTVDKSRWQQGNVFSCSVMHEALHNHYTQKSLSLSPGK

SEQ ID NO: 107 - protein, 214 aa, Homo sapiens
  MISC_FEATURE: anti CD19 light chain variable
DIQMTQSPSSLSASVGDRVTITCRASQDISKYLNWYQQKPGKAIKLLIYHTSRLHSGVPSRFSGSGSGTDFTLTISSLQPEDFATYYCQQGATLPYTFGPGTKVDIKRTVAAPSVFIFPPSDEQLKSGTASVVCLLNNFYPREAKVQWKVDNALQSGNSQESVTEQDSKDSTYSLSSTLTLSKADYEKHKVYACEVTHQGLSSPVTKSFNRGEC

SEQ ID NO: 108 - protein, 11 aa, Homo sapiens
  MISC_FEATURE: anti CD19 LCCDR1
RASQDISKYLN

SEQ ID NO: 109 - protein, 7 aa, Homo sapiens
  MISC_FEATURE: anti CD19 LCCDR2
HTSRLHS

SEQ ID NO: 110 - protein, 9 aa, Homo sapiens
  MISC_FEATURE: anti CD19 LCCDR3
QQGNTLPYT

SEQ ID NO: 111 - protein, 10 aa, Homo sapiens
  MISC_FEATURE: anti CD19 HCCDR1
GVSLPDYGVS

SEQ ID NO: 112 - protein, 16 aa, Homo sapiens
  MISC_FEATURE: anti CD19 HCCDR2
VIWGSETTYYSSSLKS

SEQ ID NO: 113 - protein, 16 aa, Homo sapiens
  MISC_FEATURE: anti CD19 HCCDR2
VIWGSETTYYQSSLKS

SEQ ID NO: 114 - protein, 16 aa, Homo sapiens
  MISC_FEATURE: anti CD19 HCCDR2
VIWGSETTYYNSSLKS

SEQ ID NO: 115 - protein, 12 aa, Homo sapiens
  MISC_FEATURE: anti CD19 HCCDR3
HYYYGGSYAMDY

SEQ ID NO: 116 - protein, 242 aa, Homo sapiens
  MISC_FEATURE: antiCD19 CAR
EIVMTQSPATLSLSPGERATLSCRASQDISKYLNWYQQKPGQAPRLLIYHTSRLHSGIPARFSGSGSGTDYTLTISSLQPEDFAVYFCQQGNTLPYTFGQGTKLEIKGGGGSGGGGSGGGGSQVQLQESGPGLVKPSETLSLTCTVSGVSLPDYGVSWIRQPPGKGLEWIGVIWGSETTYYQSSLKSRVTISKDNSKNQVSLKLSSVTAADTAVYYCAKHYYYGGSYAMDYWGQGTLVTVSS

SEQ ID NO: 117 - protein, 107 aa, Homo sapiens
  MISC_FEATURE: huFMC63VLv1
DIQMTQSPSSLSASVGDRVTITCRASQDISKYLNWYQQKPGGTVKLLIYHTSRLHSGVPSRFSGSGSGTDFTLTISSLQPEDIATYYCQQGNTLPYTFGGGTKLEIT

SEQ ID NO: 118 - protein, 107 aa, Homo sapiens
  MISC_FEATURE: HUFMC63VLV2
DIQMTQSPSSLSASVGDRVTITCRASQDISKYLNWYQQKPGGTVKLLIYHTSRLHSGVPSRFSGSGSGTDFTLTISSLQPEDIATYFCQQGNTLPYTFGGGTKLEIT

SEQ ID NO: 119 - protein, 107 aa, Homo sapiens
  MISC_FEATURE: HUFMC63VLV3
DIQMTQSPSSLSASVGDRVTITCRASQDISKYLNWYQQKPDGTVKLLIYHTSRLHSGVPSRFSGSGSGTDYTLTISSLQPEDIATYFCQQGNTLPYTFGGGTKLEIT

SEQ ID NO: 120 - protein, 120 aa, Homo sapiens
  MISC_FEATURE: HUFMC63VHV1
QVQLQESGPGLVKPSQTLSLTCTVSGVSLPDYGVSWIRQPPGKGLEWIGVIWGSETTYYNSALKSRLTISKDNSKNQVSLKLSSVTAADTAVYYCAKHYYYGGSYAMDYWGQGTSVTVSS

SEQ ID NO: 121 - protein, 120 aa, Homo sapiens
  MISC_FEATURE: HUFMC63VHV2
QVQLQESGPGLVKPSQTLSLTCTVSGVSLPDYGVSWIRQPPGKGLEWLGVIWGSETTYYNSALKSRLTISKDNSKSQVSLKLSSVTAADTAVYYCAKHYYYGGSYAMDYWGQGTSVTVSS

SEQ ID NO: 122 - protein, 120 aa, Homo sapiens
  MISC_FEATURE: HUFMC63VHV3
QVQLQESGPGLVKPSQTLSVTCTVSGVSLPDYGVSWIRQPPGKGLEWLGVIWGSETTYYNSALKSRLTISKDNSKSQVSLKLSSVTAADTAVYYCAKHYYYGGSYAMDYWGQGTSVTVSS

SEQ ID NO: 123 - protein, 120 aa, Homo sapiens
  MISC_FEATURE: HUFMC63VHV4
QVQLQESGPGLVKPSQTLSVTCTVSGVSLPDYGVSWIRQPPRKGLEWLGVIWGSETTYYNSALKSRLTISKDNSKSQVSLKMSSVTAADTAIYYCAKHYYYGGSYAMDYWGQGTSVTVSS

SEQ ID NO: 124 - protein, 11 aa, Homo sapiens
  MISC_FEATURE: huFMC63VLv1 CDR1
RASQDISKYLN

SEQ ID NO: 125 - protein, 7 aa, Homo sapiens
  MISC_FEATURE: huFMC63VLv1 CDR2
HTSRLHS

SEQ ID NO: 126 - protein, 9 aa, Homo sapiens
  MISC_FEATURE: huFMC63VLv1 CDR3
QQGNTLPYT

SEQ ID NO: 127 - protein, 11 aa, Homo sapiens
  MISC_FEATURE: HUFMC63VLV2 CDR1
RASQDISKYLN

SEQ ID NO: 128 - protein, 7 aa, Homo sapiens
  MISC_FEATURE: HUFMC63VLV2 CDR2
HTSRLHS

SEQ ID NO: 129 - protein, 9 aa, Homo sapiens
  MISC_FEATURE: HUFMC63VLV2 CDR3
QQGNTLPYT

SEQ ID NO: 130 - protein, 11 aa, Homo sapiens
  MISC_FEATURE: HUFMC63VLV3 CDR1
RASQDISKYLN

SEQ ID NO: 131 - protein, 7 aa, Homo sapiens
  MISC_FEATURE: HUFMC63VLV3 CDR2
HTSRLHS

SEQ ID NO: 132 - protein, 9 aa, Homo sapiens
  MISC_FEATURE: HUFMC63VLV3 CDR3
QQGNTLPYT

SEQ ID NO: 133 - protein, 10 aa, Homo sapiens
  MISC_FEATURE: HUFMC63VHV1 CDR1
GVSLPDYGVS

SEQ ID NO: 134 - protein, 16 aa, Homo sapiens
  MISC_FEATURE: HUFMC63VHV1 CDR2
VIWGSETTYYNSALKS

SEQ ID NO: 135 - protein, 12 aa, Homo sapiens
  MISC_FEATURE: HUFMC63VHV1 CDR3
HYYYGGSYAMDY

SEQ ID NO: 136 - protein, 10 aa, Homo sapiens
  MISC_FEATURE: HUFMC63VHV2 CDR1
GVSLPDYGVS

SEQ ID NO: 137 - protein, 16 aa, Homo sapiens
  MISC_FEATURE: HUFMC63VHV2 CDR2
VIWGSETTYYNSALKS

SEQ ID NO: 138 - protein, 12 aa, Homo sapiens
  MISC_FEATURE: HUFMC63VHV2 CDR3
HYYYGGSYAMDY

SEQ ID NO: 139 - protein, 10 aa, Homo sapiens
  MISC_FEATURE: HUFMC63VHV3 CDR1
GVSLPDYGVS

SEQ ID NO: 140 - protein, 16 aa, Homo sapiens
  MISC_FEATURE: HUFMC63VHV3 CDR2
VIWGSETTYYNSALKS

SEQ ID NO: 141 - protein, 12 aa, Homo sapiens
  MISC_FEATURE: HUFMC63VHV3 CDR3
HYYYGGSYAMDY

SEQ ID NO: 142 - protein, 10 aa, Homo sapiens
  MISC_FEATURE: HUFMC63VHV4 CDR1
GVSLPDYGVS

SEQ ID NO: 143 - protein, 16 aa, Homo sapiens
  MISC_FEATURE: HUFMC63VHV4 CDR2
VIWGSETTYYNSALKS

SEQ ID NO: 144 - protein, 12 aa, Homo sapiens
  MISC_FEATURE: HUFMC63VHV4 CDR3
HYYYGGSYAMDY

SEQ ID NO: 145 - DNA, 1122 bp, Homo sapiens
  misc_feature: DNA Sequence  NKG2D-CD8a hinge-Ox40-CD3z
atggccttaccagtgaccgccttgctcctgccgctggccttgctgctccacgccgccaggccgttattcaaccaagaagttcaaattcccttgaccgaaagttactgtggcccatgtcctaaaaactggatatgttacaaaaataactgctaccaattttttgatgagagtaaaaactggtatgagagccaggcttcttgtatgtctcaaaatgccagccttctgaaagtatacagcaaagaggaccaggatttacttaaactggtgaagtcatatcattggatgggactagtacacattccaacaaatggatcttggcagtgggaagatggctccattctctcacccaacctactaacaataattgaaatgcagaagggagactgtgcactctatgcctcgagctttaaaggctatatagaaaactgttcaactccaaatacgtacatctgcatgcaaaggactgtgaccacgacgccagcgccgcgaccaccaacaccggcgcccaccatcgcgtcgcagcccctgtccctgcgcccagaggcgtgccggccagcggcggggggcgcagtgcacacgagggggctggacttcgcctgtgatatctacatctgggcgcccttggccgggacttgtggggtccttctcctgtcactggttatcaccctttactgccggagggaccagaggctgccccccgatgcccacaagccccctgggggaggcagtttccggacccccatccaagaggagcaggccgacgcccactccaccctggccaagatcagagtgaagttcagcaggagcgcagacgcccccgcgtaccagcagggccagaaccagctctataacgagctcaatctaggacgaagagaggagtacgatgttttggacaagagacgtggccgggaccctgagatggggggaaagccgagaaggaagaaccctcaggaaggcctgtacaatgaactgcagaaagataagatggcggaggcctacagtgagattgggatgaaaggcgagcgccggaggggcaaggggcacgatggcctttaccagggtctcagtacagccaccaaggacacctacgacgcccttcacatgcaggccctgccccctcgc

SEQ ID NO: 146 - protein, 341 aa, Homo sapiens
  MISC_FEATURE: Amino Acid Sequence NKG2D-IgG4 hinge-OX40-CD3z
  MISC_FEATURE: Amino Acid Sequence NKG2D-***IgG4 hinge***-OX40-CD3z
MALPVTALLLPLALLLHAARPLFNQEVQIPLTESYCGPCPKNWICYKNNCYQFFDESKNWYESQASCMSQNASLLKVYSKEDQDLLKLVKSYHWMGLVHIPTNGSWQWEDGSILSPNLLTIIEMQKGDCALYASSFKGYIENCSTPNTYICMQRTVESKYGPPCPSCPIYIWAPLAGTCGVLLLSLVITLYCRRDQRLPPDAHKPPGGGSFRTPIQEEQADAHSTLAKIRVKFSRSADAPAYQQGQNQLYNELNLGRREEYDVLDKRRGRDPEMGGKPRRKNPQEGLYNELQKDKMAEAYSEIGMKGERRRGKGHDGLYQGLSTATKDTYDALHMQALPPR

SEQ ID NO: 147 - DNA, 20 bp, Homo sapiens
  misc_feature: TGFBR2 guide RNA 1
cccctaccatgactttattc

SEQ ID NO: 148 - DNA, 20 bp, Homo sapiens
  misc_feature: TGFBR2 guide RNA 2
attgcactcatcagagctac

SEQ ID NO: 149 - DNA, 20 bp, Homo sapiens
  misc_feature: TGFBR2 guide RNA 3
agtcatggtaggggagcttg

SEQ ID NO: 150 - DNA, 20 bp, Homo sapiens
  misc_feature: TGFBR2 guide RNA 4
tgctggcgatacgcgtccac

SEQ ID NO: 151 - DNA, 20 bp, Homo sapiens
  misc_feature: TGFBR2 guide RNA 5
gtgagcaatcccccgggcga

SEQ ID NO: 152 - DNA, 20 bp, Homo sapiens
  misc_feature: TGFBR2 guide RNA 6
aacgtgcggtgggatcgtgc

SEQ ID NO: 153 - DNA, 20 bp, Homo sapiens
  misc_feature: CISH guide RNA 1
ctcaccagattcccgaaggt

SEQ ID NO: 154 - DNA, 20 bp, Homo sapiens
  misc_feature: CISH guide RNA 2
ccgccttgtcatcaaccgtc

SEQ ID NO: 155 - DNA, 20 bp, Homo sapiens
  misc_feature: CISH guide RNA 3
tctgcgttcaggggtaagcg

SEQ ID NO: 156 - DNA, 20 bp, Homo sapiens
  misc_feature: CISH guide RNA 4
gcgcttacccctgaacgcag

SEQ ID NO: 157 - DNA, 20 bp, Homo sapiens
  misc_feature: CISH guide RNA 5
cgcagaggaccatgtccccg

SEQ ID NO: 158 - DNA, 20 bp, Homo sapiens
  misc_feature: NKG2A Guide RNA 1
ggagctgatggtaaatctgc

SEQ ID NO: 159 - DNA, 20 bp, Homo sapiens
  misc_feature: NKG2A guide RNA 2
ttgaaggtttaattccgcat

SEQ ID NO: 160 - DNA, 20 bp, Homo sapiens
  misc_feature: NKG2A guide RNA 3
aacaactatcgttaccacag

SEQ ID NO: 161 - DNA, 20 bp, Homo sapiens
  misc_feature: CD70 guide RNA 1
tcaccaagcccgcgaccaat

SEQ ID NO: 162 - DNA, 20 bp, Homo sapiens
  misc_feature: CD70 guide RNA 2
gctttggtcccattggtcgc

SEQ ID NO: 163 - DNA, 20 bp, Homo sapiens
  misc_feature: CD70 guide RNA 3
accctcctccggcatcgccg

SEQ ID NO: 164 - DNA, 23 bp, Homo sapiens
  misc_feature: CBLB guide RNA 1
taatctggtggacctcatgaagg

SEQ ID NO: 165 - DNA, 23 bp, Homo sapiens
  misc_feature: CBLB guide RNA 2
tcggttggcaaacgtccgaaagg

SEQ ID NO: 166 - DNA, 23 bp, Homo sapiens
  misc_feature: CBLB guide RNA 3
agcaagctgccgcagatcgcagg

SEQ ID NO: 167 - DNA, 23 bp, Homo sapiens
  misc_feature: TRIM29 guide RNA 1
gaacggtaggtcccctctcgtgg

SEQ ID NO: 168 - DNA, 23 bp, Homo sapiens
  misc_feature: TRIM29 guide RNA 2
agctgccttggacgacgggcagg

SEQ ID NO: 169 - DNA, 23 bp, Homo sapiens
  misc_feature: TRIM29 guide RNA 3
tgagccgtaacttcattgagagg

SEQ ID NO: 170 - DNA, 20 bp, Homo sapiens
  misc_feature: CD45 guide RNA 1
agtgctggtgttgggcgcac

SEQ ID NO: 171 - DNA, 23 bp, Homo sapiens
  misc_feature: SOCS2 guide RNA 1
gtgaacagtgccgttccgggggg

SEQ ID NO: 172 - DNA, 23 bp, Homo sapiens
  misc_feature: SOCS2-2 gRNA
ggcaccggtacatttgttaatgg

SEQ ID NO: 173 - DNA, 23 bp, Homo sapiens
  misc_feature: SOCS2-3 gRNA
ttcgccagacgcgccgcctgcgg

SEQ ID NO: 174 - protein, 374 aa, Homo sapiens
  MISC_FEATURE: NKG2D-CD8ahinge/tm-OX40-CD3z
MALPVTALLLPLALLLHAARPLFNQEVQIPLTESYCGPCPKNWICYKNNCYQFFDESKNWYESQASCMSQNASLLKVYSKEDQDLLKLVKSYHWMGLVHIPTNGSWQWEDGSILSPNLLTIIEMQKGDCALYASSFKGYIENCSTPNTYICMQRTVTTTPAPRPPTPAPTIASQPLSLRPEACRPAAGGAVHTRGLDFACDIYIWAPLAGTCGVLLLSLVITLYCRRDQRLPPDAHKPPGGGSFRTPIQEEQADAHSTLAKIRVKFSRSADAPAYQQGQNQLYNELNLGRREEYDVLDKRRGRDPEMGGKPRRKNPQEGLYNELQKDKMAEAYSEIGMKGERRRGKGHDGLYQGLSTATKDTYDALHMQALPPR

SEQ ID NO: 175 - DNA, 2150 bp, Homo sapiens
  misc_feature: DNA NK19H-NF-1
gaattcgccgccaccatggccttaccagtgaccgccttgctcctgccgctggccttgctgctccacgccgccaggccggatattcagatgacccagagcccgagcagcctgagcgcgagcgtgggcgatcgcgtgaccattacctgccgcgcgagccaggatattagcaaatatctgaactggtatcagcagaaaccgggcggcaccgtgaaactgctgatttatcataccagccgcctgcatagcggcgtgccgagccgctttagcggcagcggcagcggcaccgattttaccctgaccattagcagcctgcagccggaagatattgcgacctattattgccagcagggcaacaccctgccgtatacctttggcggcggcaccaaactggaaattaccggtggcggtggctcgggcggtggtgggtcgggtggcggcggatctcaggtgcagctgcaggaaagcggcccgggcctggtgaaaccgagccagaccctgagcctgacctgcaccgtgagcggcgtgagcctgccggattatggcgtgagctggattcgccagccgccgggcaaaggcctggaatggattggcgtgatttggggcagcgaaaccacctattataacagcgcgctgaaaagccgcctgaccattagcaaagataacagcaaaaaccaggtgagcctgaaactgagcagcgtgaccgcggcggataccgcggtgtattattgcgcgaaacattattattatggcggcagctatgcgatggattattggggccagggcaccagcgtgaccgtgagcagcaccacgacgccagcgccgcgaccaccaacaccggcgcccaccatcgcgtcgcagcccctgtccctgcgcccagaggcgtgccggccagcggcggggggcgcagtgcacacgagggggctggacttcgcctgtgatatctacatctgggcgcccttggccgggacttgtggggtccttctcctgtcactggttatcaccctttactgccggagggaccagaggctgccccccgatgcccacaagccccctgggggaggcagtttccggacccccatccaagaggagcaggccgacgcccactccaccctggccaagatcagagtgaagttcagcaggagcgcagacgcccccgcgtaccagcagggccagaaccagctctataacgagctcaatctaggacgaagagaggagtacgatgttttggacaagagacgtggccgggaccctgagatggggggaaagccgagaaggaagaaccctcaggaaggcctgtacaatgaactgcagaaagataagatggcggaggcctacagtgagattgggatgaaaggcgagcgccggaggggcaaggggcacgatggcctttaccagggtctcagtacagccaccaaggacacctacgacgcccttcacatgcaggccctgccccctcgcggctctggcgagggaaggggttccctgcttacttgcggcgacgtcgaagagaatcccggtccgatggccctcccagtaactgccctccttttgcccctcgcactccttcttcatgccgctcgccccaactgggtcaacgtgattagcgatttgaagaaaatcgaggaccttatacagtctatgcatattgacgctacactgtatactgagagtgatgtacacccgtcctgtaaggtaacggccatgaaatgctttcttctggagctccaggtcatcagcttggagtctggggacgcaagcatccacgatacggttgaaaacctcatcatccttgcgaacaactctctctcatctaatggaaacgttacagagagtgggtgtaaggagtgcgaagagttggaagaaaaaaacatcaaagaatttcttcaatccttcgttcacatagtgcaaatgttcattaacacgtccactaccacacccgccccgaggccacctacgccggcaccgactatcgccagtcaacccctctctctgcgccccgaggcttgccggcctgcggctggtggggcggtccacacccggggcctggattttgcgtgcgatatatacatctgggcacctcttgccggcacctgcggagtgctgcttctctcactcgttattacgctgtactgctaagcggccgcgtcgac

SEQ ID NO: 176 - protein, 706 aa, Homo sapiens
  MISC_FEATURE: AA NK19H-NF-1
MALPVTALLLPLALLLHAARPDIQMTQSPSSLSASVGDRVTITCRASQDISKYLNWYQQKPGGTVKLLIYHTSRLHSGVPSRFSGSGSGTDFTLTISSLQPEDIATYYCQQGNTLPYTFGGGTKLEITGGGGSGGGGSGGGGSQVQLQESGPGLVKPSQTLSLTCTVSGVSLPDYGVSWIRQPPGKGLEWIGVIWGSETTYYNSALKSRLTISKDNSKNQVSLKLSSVTAADTAVYYCAKHYYYGGSYAMDYWGQGTSVTVSSTTTPAPRPPTPAPTIASQPLSLRPEACRPAAGGAVHTRGLDFACDIYIWAPLAGTCGVLLLSLVITLYCRRDQRLPPDAHKPPGGGSFRTPIQEEQADAHSTLAKIRVKFSRSADAPAYQQGQNQLYNELNLGRREEYDVLDKRRGRDPEMGGKPRRKNPQEGLYNELQKDKMAEAYSEIGMKGERRRGKGHDGLYQGLSTATKDTYDALHMQALPPRGSGEGRGSLLTCGDVEENPGPMALPVTALLLPLALLLHAARPNWVNVISDLKKIEDLIQSMHIDATLYTESDVHPSCKVTAMKCFLLELQVISLESGDASIHDTVENLIILANNSLSSNGNVTESGCKECEELEEKNIKEFLQSFVHIVQMFINTSTTTPAPRPPTPAPTIASQPLSLRPEACRPAAGGAVHTRGLDFACDIYIWAPLAGTCGVLLLSLVITLYC

SEQ ID NO: 177 - DNA, 2150 bp, Homo sapiens
  misc_feature: DNA NK19H-NF-2
gaattcgccgccaccatggccttaccagtgaccgccttgctcctgccgctggccttgctgctccacgccgccaggccggatattcagatgacccagagcccgagcagcctgagcgcgagcgtgggcgatcgcgtgaccattacctgccgcgcgagccaggatattagcaaatatctgaactggtatcagcagaaaccgggcggcaccgtgaaactgctgatttatcataccagccgcctgcatagcggcgtgccgagccgctttagcggcagcggcagcggcaccgattttaccctgaccattagcagcctgcagccggaagatattgcgacctatttttgccagcagggcaacaccctgccgtatacctttggcggcggcaccaaactggaaattaccggtggcggtggctcgggcggtggtgggtcgggtggcggcggatctcaggtgcagctgcaggaaagcggcccgggcctggtgaaaccgagccagaccctgagcctgacctgcaccgtgagcggcgtgagcctgccggattatggcgtgagctggattcgccagccgccgggcaaaggcctggaatggattggcgtgatttggggcagcgaaaccacctattataacagcgcgctgaaaagccgcctgaccattagcaaagataacagcaaaaaccaggtgagcctgaaactgagcagcgtgaccgcggcggataccgcggtgtattattgcgcgaaacattattattatggcggcagctatgcgatggattattggggccagggcaccagcgtgaccgtgagcagcaccacgacgccagcgccgcgaccaccaacaccggcgcccaccatcgcgtcgcagcccctgtccctgcgcccagaggcgtgccggccagcggcggggggcgcagtgcacacgagggggctggacttcgcctgtgatatctacatctgggcgcccttggccgggacttgtggggtccttctcctgtcactggttatcaccctttactgccggagggaccagaggctgccccccgatgcccacaagccccctgggggaggcagtttccggacccccatccaagaggagcaggccgacgcccactccaccctggccaagatcagagtgaagttcagcaggagcgcagacgcccccgcgtaccagcagggccagaaccagctctataacgagctcaatctaggacgaagagaggagtacgatgttttggacaagagacgtggccgggaccctgagatggggggaaagccgagaaggaagaaccctcaggaaggcctgtacaatgaactgcagaaagataagatggcggaggcctacagtgagattgggatgaaaggcgagcgccggaggggcaaggggcacgatggcctttaccagggtctcagtacagccaccaaggacacctacgacgcccttcacatgcaggccctgccccctcgcggctctggcgagggaaggggttccctgcttacttgcggcgacgtcgaagagaatcccggtccgatggccctcccagtaactgccctccttttgcccctcgcactccttcttcatgccgctcgccccaactgggtcaacgtgattagcgatttgaagaaaatcgaggaccttatacagtctatgcatattgacgctacactgtatactgagagtgatgtacacccgtcctgtaaggtaacggccatgaaatgctttcttctggagctccaggtcatcagcttggagtctggggacgcaagcatccacgatacggttgaaaacctcatcatccttgcgaacaactctctctcatctaatggaaacgttacagagagtgggtgtaaggagtgcgaagagttggaagaaaaaaacatcaaagaatttcttcaatccttcgttcacatagtgcaaatgttcattaacacgtccactaccacacccgccccgaggccacctacgccggcaccgactatcgccagtcaacccctctctctgcgccccgaggcttgccggcctgcggctggtggggcggtccacacccggggcctggattttgcgtgcgatatatacatctgggcacctcttgccggcacctgcggagtgctgcttctctcactcgttattacgctgtactgctaagcggccgcgtcgac

SEQ ID NO: 178 - protein, 706 aa, Homo sapiens
  MISC_FEATURE: AA NK19H-NF-2
MALPVTALLLPLALLLHAARPDIQMTQSPSSLSASVGDRVTITCRASQDISKYLNWYQQKPGGTVKLLIYHTSRLHSGVPSRFSGSGSGTDFTLTISSLQPEDIATYFCQQGNTLPYTFGGGTKLEITGGGGSGGGGSGGGGSQVQLQESGPGLVKPSQTLSLTCTVSGVSLPDYGVSWIRQPPGKGLEWIGVIWGSETTYYNSALKSRLTISKDNSKNQVSLKLSSVTAADTAVYYCAKHYYYGGSYAMDYWGQGTSVTVSSTTTPAPRPPTPAPTIASQPLSLRPEACRPAAGGAVHTRGLDFACDIYIWAPLAGTCGVLLLSLVITLYCRRDQRLPPDAHKPPGGGSFRTPIQEEQADAHSTLAKIRVKFSRSADAPAYQQGQNQLYNELNLGRREEYDVLDKRRGRDPEMGGKPRRKNPQEGLYNELQKDKMAEAYSEIGMKGERRRGKGHDGLYQGLSTATKDTYDALHMQALPPRGSGEGRGSLLTCGDVEENPGPMALPVTALLLPLALLLHAARPNWVNVISDLKKIEDLIQSMHIDATLYTESDVHPSCKVTAMKCFLLELQVISLESGDASIHDTVENLIILANNSLSSNGNVTESGCKECEELEEKNIKEFLQSFVHIVQMFINTSTTTPAPRPPTPAPTIASQPLSLRPEACRPAAGGAVHTRGLDFACDIYIWAPLAGTCGVLLLSLVITLYC

SEQ ID NO: 179 - DNA, 2150 bp, Homo sapiens
  misc_feature: DNA NK19H-NF-3
gaattcgccgccaccatggccttaccagtgaccgccttgctcctgccgctggccttgctgctccacgccgccaggccggatattcagatgacccagagcccgagcagcctgagcgcgagcgtgggcgatcgcgtgaccattacctgccgcgcgagccaggatattagcaaatatctgaactggtatcagcagaaaccggatggcaccgtgaaactgctgatttatcataccagccgcctgcatagcggcgtgccgagccgctttagcggcagcggcagcggcaccgattataccctgaccattagcagcctgcagccggaagatattgcgacctatttttgccagcagggcaacaccctgccgtatacctttggcggcggcaccaaactggaaattaccggtggcggtggctcgggcggtggtgggtcgggtggcggcggatctcaggtgcagctgcaggaaagcggcccgggcctggtgaaaccgagccagaccctgagcctgacctgcaccgtgagcggcgtgagcctgccggattatggcgtgagctggattcgccagccgccgggcaaaggcctggaatggattggcgtgatttggggcagcgaaaccacctattataacagcgcgctgaaaagccgcctgaccattagcaaagataacagcaaaaaccaggtgagcctgaaactgagcagcgtgaccgcggcggataccgcggtgtattattgcgcgaaacattattattatggcggcagctatgcgatggattattggggccagggcaccagcgtgaccgtgagcagcaccacgacgccagcgccgcgaccaccaacaccggcgcccaccatcgcgtcgcagcccctgtccctgcgcccagaggcgtgccggccagcggcggggggcgcagtgcacacgagggggctggacttcgcctgtgatatctacatctgggcgcccttggccgggacttgtggggtccttctcctgtcactggttatcaccctttactgccggagggaccagaggctgccccccgatgcccacaagccccctgggggaggcagtttccggacccccatccaagaggagcaggccgacgcccactccaccctggccaagatcagagtgaagttcagcaggagcgcagacgcccccgcgtaccagcagggccagaaccagctctataacgagctcaatctaggacgaagagaggagtacgatgttttggacaagagacgtggccgggaccctgagatggggggaaagccgagaaggaagaaccctcaggaaggcctgtacaatgaactgcagaaagataagatggcggaggcctacagtgagattgggatgaaaggcgagcgccggaggggcaaggggcacgatggcctttaccagggtctcagtacagccaccaaggacacctacgacgcccttcacatgcaggccctgccccctcgcggctctggcgagggaaggggttccctgcttacttgcggcgacgtcgaagagaatcccggtccgatggccctcccagtaactgccctccttttgcccctcgcactccttcttcatgccgctcgccccaactgggtcaacgtgattagcgatttgaagaaaatcgaggaccttatacagtctatgcatattgacgctacactgtatactgagagtgatgtacacccgtcctgtaaggtaacggccatgaaatgctttcttctggagctccaggtcatcagcttggagtctggggacgcaagcatccacgatacggttgaaaacctcatcatccttgcgaacaactctctctcatctaatggaaacgttacagagagtgggtgtaaggagtgcgaagagttggaagaaaaaaacatcaaagaatttcttcaatccttcgttcacatagtgcaaatgttcattaacacgtccactaccacacccgccccgaggccacctacgccggcaccgactatcgccagtcaacccctctctctgcgccccgaggcttgccggcctgcggctggtggggcggtccacacccggggcctggattttgcgtgcgatatatacatctgggcacctcttgccggcacctgcggagtgctgcttctctcactcgttattacgctgtactgctaagcggccgcgtcgac

SEQ ID NO: 180 - protein, 706 aa, Homo sapiens
  MISC_FEATURE: AA NK19H-NF-3
MALPVTALLLPLALLLHAARPDIQMTQSPSSLSASVGDRVTITCRASQDISKYLNWYQQKPDGTVKLLIYHTSRLHSGVPSRFSGSGSGTDYTLTISSLQPEDIATYFCQQGNTLPYTFGGGTKLEITGGGGSGGGGSGGGGSQVQLQESGPGLVKPSQTLSLTCTVSGVSLPDYGVSWIRQPPGKGLEWIGVIWGSETTYYNSALKSRLTISKDNSKNQVSLKLSSVTAADTAVYYCAKHYYYGGSYAMDYWGQGTSVTVSSTTTPAPRPPTPAPTIASQPLSLRPEACRPAAGGAVHTRGLDFACDIYIWAPLAGTCGVLLLSLVITLYCRRDQRLPPDAHKPPGGGSFRTPIQEEQADAHSTLAKIRVKFSRSADAPAYQQGQNQLYNELNLGRREEYDVLDKRRGRDPEMGGKPRRKNPQEGLYNELQKDKMAEAYSEIGMKGERRRGKGHDGLYQGLSTATKDTYDALHMQALPPRGSGEGRGSLLTCGDVEENPGPMALPVTALLLPLALLLHAARPNWVNVISDLKKIEDLIQSMHIDATLYTESDVHPSCKVTAMKCFLLELQVISLESGDASIHDTVENLIILANNSLSSNGNVTESGCKECEELEEKNIKEFLQSFVHIVQMFINTSTTTPAPRPPTPAPTIASQPLSLRPEACRPAAGGAVHTRGLDFACDIYIWAPLAGTCGVLLLSLVITLYC

SEQ ID NO: 181 - DNA, 2059 bp, Homo sapiens
  misc_feature: DNA NK19H-NF-4
gaattcgccgccaccatggccttaccagtgaccgccttgctcctgccgctggccttgctgctccacgccgccaggccggatattcagatgacccagagcccgagcagcctgagcgcgagcgtgggcgatcgcgtgaccattacctgccgcgcgagccaggatattagcaaatatctgaactggtatcagcagaaaccgggcggcaccgtgaaactgctgatttatcataccagccgcctgcatagcggcgtgccgagccgctttagcggcagcggcagcggcaccgattttaccctgaccattagcagcctgcagccggaagatattgcgacctattattgccagcagggcaacaccctgccgtatacctttggcggcggcaccaaactggaaattaccggtggcggtggctcgggcggtggtgggtcgggtggcggcggatctcaggtgcagctgcaggaaagcggcccgggcctggtgaaaccgagccagaccctgagcctgacctgcaccgtgagcggcgtgagcctgccggattatggcgtgagctggattcgccagccgccgggcaaaggcctggaatggctgggcgtgatttggggcagcgaaaccacctattataacagcgcgctgaaaagccgcctgaccattagcaaagataacagcaaaagccaggtgagcctgaaactgagcagcgtgaccgcggcggataccgcggtgtattattgcgcgaaacattattattatggcggcagctatgcgatggattattggggccagggcaccagcgtgaccgtgagcagcaccacgacgccagcgccgcgaccaccaacaccggcgcccaccatcgcgtcgcagcccctgtccctgcgcccagaggcgtgccggccagcggcggggggcgcagtgcacacgagggggctggacttcgcctgtgatatctacatctgggcgcccttggccgggacttgtggggtccttctcctgtcactggttatcaccctttactgccggagggaccagaggctgccccccgatgcccacaagccccctgggggaggcagtttccggacccccatccaagaggagcaggccgacgcccactccaccctggccaagatcagagtgaagttcagcaggagcgcagacgcccccgcgtaccagcagggccagaaccagctctataacgagctcaatctaggacgaagagaggagtacgatgttttggacaagagacgtggccgggaccctgagatggggggaaagccgagaaggaagaaccctcaggaaggcctgtacaatgaactgcagaaagataagatggcggaggcctacagtgagattgggatgaaaggcgagcgccggaggggcaaggggcacgatggcctttaccagggtctcagtacagccaccaaggacacctacgacgcccttcacatgcaggccctgccccctcgcggctctggcgagggaaggggttccctgcttacttgcggcgacgtcgaagagaatcccggtccgatggccctcccagtaactgccctccttttgcccctcgcactccttcttcatgccgctcgccccaactgggtcaacgtgattagcgatttgaagaaaatcgaggaccttatacagtctatgcatattgacgctacactgtatactgagagtgatgtacacccgtcctgtaaggtaacggccatgaaatgctttcttctggagctccaggtcatcagcttggagtctggggacgcaagcatccacgatacggttgaaaacctcatcatccttgcgaacaactctctctcatctaatggaaacgttacagagagtgggtgtaaggagtgcgaagagttggaagaaaaaaacatcaaagaatttcttcaatccttcgttcacatagtgcaaatgttcattaacacgtccactaccacacccgccccgaggccacctacgccggcaccgactatcgccagtcaacccctctctctgcgccccgaggcttgccggcctgcggctggtggggcggtccacacccggggcctggattttgcgtgcg

SEQ ID NO: 182 - protein, 706 aa, Homo sapiens
  MISC_FEATURE: AA NK19H-NF-4
MALPVTALLLPLALLLHAARPDIQMTQSPSSLSASVGDRVTITCRASQDISKYLNWYQQKPGGTVKLLIYHTSRLHSGVPSRFSGSGSGTDFTLTISSLQPEDIATYYCQQGNTLPYTFGGGTKLEITGGGGSGGGGSGGGGSQVQLQESGPGLVKPSQTLSLTCTVSGVSLPDYGVSWIRQPPGKGLEWLGVIWGSETTYYNSALKSRLTISKDNSKSQVSLKLSSVTAADTAVYYCAKHYYYGGSYAMDYWGQGTSVTVSSTTTPAPRPPTPAPTIASQPLSLRPEACRPAAGGAVHTRGLDFACDIYIWAPLAGTCGVLLLSLVITLYCRRDQRLPPDAHKPPGGGSFRTPIQEEQADAHSTLAKIRVKFSRSADAPAYQQGQNQLYNELNLGRREEYDVLDKRRGRDPEMGGKPRRKNPQEGLYNELQKDKMAEAYSEIGMKGERRRGKGHDGLYQGLSTATKDTYDALHMQALPPRGSGEGRGSLLTCGDVEENPGPMALPVTALLLPLALLLHAARPNWVNVISDLKKIEDLIQSMHIDATLYTESDVHPSCKVTAMKCFLLELQVISLESGDASIHDTVENLIILANNSLSSNGNVTESGCKECEELEEKNIKEFLQSFVHIVQMFINTSTTTPAPRPPTPAPTIASQPLSLRPEACRPAAGGAVHTRGLDFACDIYIWAPLAGTCGVLLLSLVITLYC

SEQ ID NO: 183 - DNA, 2153 bp, Homo sapiens
  misc_feature: DNA NK19H-NF-5
gaattcgccgccaccatggccttaccagtgaccgccttgctcctgccgctggccttgctgctccacgccgccaggccggatattcagatgacccagagcccgagcagcctgagcgcgagcgtgggcgatcgcgtgaccattacctgccgcgcgagccaggatattagcaaatatctgaactggtatcagcagaaaccgggcggcaccgtgaaactgctgatttatcataccagccgcctgcatagcggcgtgccgagccgctttagcggcagcggcagcggcaccgattttaccctgaccattagcagcctgcagccggaagatattgcgacctatttttgccagcagggcaacaccctgccgtatacctttggcggcggcaccaaactggaaattaccggtggcggtggctcgggcggtggtgggtcgggtggcggcggatctcaggtgcagctgcaggagtcaggacctggcctggtgaaaccctcacagactctgtccctgacatgcactgtctcaggggtctcattacccgactatggtgtaagctggattcgccagcctccaggtaagggtctggagtggctgggagtaatatggggtagtgaaaccacatactataattcagctctcaaatccagactgaccatctccaaggacaactccaagagccaagtttccttaaaattaagtagtgttactgctgctgacacagccgtctactactgtgccaaacattattactacggtggtagctatgctatggactactggggccaaggaacctcagtcaccgtctcctcaaccacgacgccagcgccgcgaccaccaacaccggcgcccaccatcgcgtcgcagcccctgtccctgcgcccagaggcgtgccggccagcggcggggggcgcagtgcacacgagggggctggacttcgcctgtgatatctacatctgggcgcccttggccgggacttgtggggtccttctcctgtcactggttatcaccctttactgccggagggaccagaggctgccccccgatgcccacaagccccctgggggaggcagtttccggacccccatccaagaggagcaggccgacgcccactccaccctggccaagatcagagtgaagttcagcagatctagcgcagacgcccccgcgtaccagcagggccagaaccagctctataacgagctcaatctaggacgaagagaggagtacgatgttttggacaagagacgtggccgggaccctgagatggggggaaagccgagaaggaagaaccctcaggaaggcctgtacaatgaactgcagaaagataagatggcggaggcctacagtgagattgggatgaaaggcgagcgccggaggggcaaggggcacgatggcctttaccagggtctcagtacagccaccaaggacacctacgacgcccttcacatgcaggccctgccccctcgcggctctggcgagggaaggggttccctgcttacttgcggcgacgtcgaagagaatcccggtccgatggccctcccagtaactgccctccttttgcccctcgcactccttcttcatgccgctcgccccaactgggtcaacgtgattagcgatttgaagaaaatcgaggaccttatacagtctatgcatattgacgctacactgtatactgagagtgatgtacacccgtcctgtaaggtaacggccatgaaatgctttcttctggagctccaggtcatcagcttggagtctggggacgcaagcatccacgatacggttgaaaacctcatcatccttgcgaacaactctctctcatctaatggaaacgttacagagagtgggtgtaaggagtgcgaagagttggaagaaaaaaacatcaaagaatttcttcaatccttcgttcacatagtgcaaatgttcattaacacgtccactaccacacccgccccgaggccacctacgccggcaccgactatcgccagtcaacccctctctctgcgccccgaggcttgccggcctgcggctggtggggcggtccacacccggggcctggattttgcgtgcgatatatacatctgggcacctcttgccggcacctgcggagtgctgcttctctcactcgttattacgctgtactgctaagcggccgcgtcgac

SEQ ID NO: 184 - protein, 707 aa, Homo sapiens
  MISC_FEATURE: AA NK19H-NF-5
MALPVTALLLPLALLLHAARPDIQMTQSPSSLSASVGDRVTITCRASQDISKYLNWYQQKPGGTVKLLIYHTSRLHSGVPSRFSGSGSGTDFTLTISSLQPEDIATYFCQQGNTLPYTFGGGTKLEITGGGGSGGGGSGGGGSQVQLQESGPGLVKPSQTLSLTCTVSGVSLPDYGVSWIRQPPGKGLEWLGVIWGSETTYYNSALKSRLTISKDNSKSQVSLKLSSVTAADTAVYYCAKHYYYGGSYAMDYWGQGTSVTVSSTTTPAPRPPTPAPTIASQPLSLRPEACRPAAGGAVHTRGLDFACDIYIWAPLAGTCGVLLLSLVITLYCRRDQRLPPDAHKPPGGGSFRTPIQEEQADAHSTLAKIRVKFSRSSADAPAYQQGQNQLYNELNLGRREEYDVLDKRRGRDPEMGGKPRRKNPQEGLYNELQKDKMAEAYSEIGMKGERRRGKGHDGLYQGLSTATKDTYDALHMQALPPRGSGEGRGSLLTCGDVEENPGPMALPVTALLLPLALLLHAARPNWVNVISDLKKIEDLIQSMHIDATLYTESDVHPSCKVTAMKCFLLELQVISLESGDASIHDTVENLIILANNSLSSNGNVTESGCKECEELEEKNIKEFLQSFVHIVQMFINTSTTTPAPRPPTPAPTIASQPLSLRPEACRPAAGGAVHTRGLDFACDIYIWAPLAGTCGVLLLSLVITLYC

SEQ ID NO: 185 - DNA, 2150 bp, Homo sapiens
  misc_feature: DNA NK19H-NF-6
gaattcgccgccaccatggccttaccagtgaccgccttgctcctgccgctggccttgctgctccacgccgccaggccggacatccagatgacacagagcccgtcctccctgtctgcctctgtgggagacagagtcaccatcacctgcagggcaagtcaggacattagtaaatatttaaattggtatcagcagaaaccagacggaactgttaaactcctgatctaccatacatcaagattacactcaggagtcccatcaaggttcagtggcagtgggtctggaacagattacaccctcaccattagcagcctgcaaccggaagatattgccacttacttctgccaacagggtaatacgcttccgtacacgttcggaggggggaccaagctggagatcacaggtggcggtggctcgggcggtggtgggtcgggtggcggcggatctcaggtgcagctgcaggagtcaggacctggcctggtgaaaccctcacagactctgtccctgacatgcactgtctcaggggtctcattacccgactatggtgtaagctggattcgccagcctccaggtaagggtctggagtggctgggagtaatatggggtagtgaaaccacatactataattcagctctcaaatccagactgaccatctccaaggacaactccaagagccaagtttccttaaaattaagtagtgttactgctgctgacacagccgtctactactgtgccaaacattattactacggtggtagctatgctatggactactggggccaaggaacctcagtcaccgtctcctcaaccacgacgccagcgccgcgaccaccaacaccggcgcccaccatcgcgtcgcagcccctgtccctgcgcccagaggcgtgccggccagcggcggggggcgcagtgcacacgagggggctggacttcgcctgtgatatctacatctgggcgcccttggccgggacttgtggggtccttctcctgtcactggttatcaccctttactgccggagggaccagaggctgccccccgatgcccacaagccccctgggggaggcagtttccggacccccatccaagaggagcaggccgacgcccactccaccctggccaagatcagagtgaagttcagcaggagcgcagacgcccccgcgtaccagcagggccagaaccagctctataacgagctcaatctaggacgaagagaggagtacgatgttttggacaagagacgtggccgggaccctgagatggggggaaagccgagaaggaagaaccctcaggaaggcctgtacaatgaactgcagaaagataagatggcggaggcctacagtgagattgggatgaaaggcgagcgccggaggggcaaggggcacgatggcctttaccagggtctcagtacagccaccaaggacacctacgacgcccttcacatgcaggccctgccccctcgcggctctggcgagggaaggggttccctgcttacttgcggcgacgtcgaagagaatcccggtccgatggccctcccagtaactgccctccttttgcccctcgcactccttcttcatgccgctcgccccaactgggtcaacgtgattagcgatttgaagaaaatcgaggaccttatacagtctatgcatattgacgctacactgtatactgagagtgatgtacacccgtcctgtaaggtaacggccatgaaatgctttcttctggagctccaggtcatcagcttggagtctggggacgcaagcatccacgatacggttgaaaacctcatcatccttgcgaacaactctctctcatctaatggaaacgttacagagagtgggtgtaaggagtgcgaagagttggaagaaaaaaacatcaaagaatttcttcaatccttcgttcacatagtgcaaatgttcattaacacgtccactaccacacccgccccgaggccacctacgccggcaccgactatcgccagtcaacccctctctctgcgccccgaggcttgccggcctgcggctggtggggcggtccacacccggggcctggattttgcgtgcgatatatacatctgggcacctcttgccggcacctgcggagtgctgcttctctcactcgttattacgctgtactgctaagcggccgcgtcgac

SEQ ID NO: 186 - protein, 706 aa, Homo sapiens
  MISC_FEATURE: AA NK19H-NF-6
MALPVTALLLPLALLLHAARPDIQMTQSPSSLSASVGDRVTITCRASQDISKYLNWYQQKPDGTVKLLIYHTSRLHSGVPSRFSGSGSGTDYTLTISSLQPEDIATYFCQQGNTLPYTFGGGTKLEITGGGGSGGGGSGGGGSQVQLQESGPGLVKPSQTLSLTCTVSGVSLPDYGVSWIRQPPGKGLEWLGVIWGSETTYYNSALKSRLTISKDNSKSQVSLKLSSVTAADTAVYYCAKHYYYGGSYAMDYWGQGTSVTVSSTTTPAPRPPTPAPTIASQPLSLRPEACRPAAGGAVHTRGLDFACDIYIWAPLAGTCGVLLLSLVITLYCRRDQRLPPDAHKPPGGGSFRTPIQEEQADAHSTLAKIRVKFSRSADAPAYQQGQNQLYNELNLGRREEYDVLDKRRGRDPEMGGKPRRKNPQEGLYNELQKDKMAEAYSEIGMKGERRRGKGHDGLYQGLSTATKDTYDALHMQALPPRGSGEGRGSLLTCGDVEENPGPMALPVTALLLPLALLLHAARPNWVNVISDLKKIEDLIQSMHIDATLYTESDVHPSCKVTAMKCFLLELQVISLESGDASIHDTVENLIILANNSLSSNGNVTESGCKECEELEEKNIKEFLQSFVHIVQMFINTSTTTPAPRPPTPAPTIASQPLSLRPEACRPAAGGAVHTRGLDFACDIYIWAPLAGTCGVLLLSLVITLYC

SEQ ID NO: 187 - DNA, 2150 bp, Homo sapiens
  misc_feature: DNA NK19H-NF-7
gaattcgccgccaccatggccttaccagtgaccgccttgctcctgccgctggccttgctgctccacgccgccaggccggacatccagatgacacagagcccgtcctccctgtctgcctctgtgggagacagagtcaccatcacctgcagggcaagtcaggacattagtaaatatttaaattggtatcagcagaaaccaggtggaactgttaaactcctgatctaccatacatcaagattacactcaggagtcccatcaaggttcagtggcagtgggtctggaacagatttcaccctcaccattagcagcctgcaaccggaagatattgccacttactactgccaacagggtaatacgcttccgtacacgttcggaggggggaccaagctggagatcacaggtggcggtggctcgggcggtggtgggtcgggtggcggcggatctcaggtgcagctgcaggagtcaggacctggcctggtgaaaccctcacagactctgtccgtgacatgcactgtctcaggggtctcattacccgactatggtgtaagctggattcgccagcctccaggtaagggtctggagtggctgggagtaatatggggtagtgaaaccacatactataattcagctctcaaatccagactgaccatctccaaggacaactccaagagccaagtttccttaaaattaagtagtgttactgctgctgacacagccgtctactactgtgccaaacattattactacggtggtagctatgctatggactactggggccaaggaacctcagtcaccgtctcctcaaccacgacgccagcgccgcgaccaccaacaccggcgcccaccatcgcgtcgcagcccctgtccctgcgcccagaggcgtgccggccagcggcggggggcgcagtgcacacgagggggctggacttcgcctgtgatatctacatctgggcgcccttggccgggacttgtggggtccttctcctgtcactggttatcaccctttactgccggagggaccagaggctgccccccgatgcccacaagccccctgggggaggcagtttccggacccccatccaagaggagcaggccgacgcccactccaccctggccaagatcagagtgaagttcagcaggagcgcagacgcccccgcgtaccagcagggccagaaccagctctataacgagctcaatctaggacgaagagaggagtacgatgttttggacaagagacgtggccgggaccctgagatggggggaaagccgagaaggaagaaccctcaggaaggcctgtacaatgaactgcagaaagataagatggcggaggcctacagtgagattgggatgaaaggcgagcgccggaggggcaaggggcacgatggcctttaccagggtctcagtacagccaccaaggacacctacgacgcccttcacatgcaggccctgccccctcgcggctctggcgagggaaggggttccctgcttacttgcggcgacgtcgaagagaatcccggtccgatggccctcccagtaactgccctccttttgcccctcgcactccttcttcatgccgctcgccccaactgggtcaacgtgattagcgatttgaagaaaatcgaggaccttatacagtctatgcatattgacgctacactgtatactgagagtgatgtacacccgtcctgtaaggtaacggccatgaaatgctttcttctggagctccaggtcatcagcttggagtctggggacgcaagcatccacgatacggttgaaaacctcatcatccttgcgaacaactctctctcatctaatggaaacgttacagagagtgggtgtaaggagtgcgaagagttggaagaaaaaaacatcaaagaatttcttcaatccttcgttcacatagtgcaaatgttcattaacacgtccactaccacacccgccccgaggccacctacgccggcaccgactatcgccagtcaacccctctctctgcgccccgaggcttgccggcctgcggctggtggggcggtccacacccggggcctggattttgcgtgcgatatatacatctgggcacctcttgccggcacctgcggagtgctgcttctctcactcgttattacgctgtactgctaagcggccgcgtcgac

SEQ ID NO: 188 - protein, 706 aa, Homo sapiens
  MISC_FEATURE: AA NK19H-NF-7
MALPVTALLLPLALLLHAARPDIQMTQSPSSLSASVGDRVTITCRASQDISKYLNWYQQKPGGTVKLLIYHTSRLHSGVPSRFSGSGSGTDFTLTISSLQPEDIATYYCQQGNTLPYTFGGGTKLEITGGGGSGGGGSGGGGSQVQLQESGPGLVKPSQTLSVTCTVSGVSLPDYGVSWIRQPPGKGLEWLGVIWGSETTYYNSALKSRLTISKDNSKSQVSLKLSSVTAADTAVYYCAKHYYYGGSYAMDYWGQGTSVTVSSTTTPAPRPPTPAPTIASQPLSLRPEACRPAAGGAVHTRGLDFACDIYIWAPLAGTCGVLLLSLVITLYCRRDQRLPPDAHKPPGGGSFRTPIQEEQADAHSTLAKIRVKFSRSADAPAYQQGQNQLYNELNLGRREEYDVLDKRRGRDPEMGGKPRRKNPQEGLYNELQKDKMAEAYSEIGMKGERRRGKGHDGLYQGLSTATKDTYDALHMQALPPRGSGEGRGSLLTCGDVEENPGPMALPVTALLLPLALLLHAARPNWVNVISDLKKIEDLIQSMHIDATLYTESDVHPSCKVTAMKCFLLELQVISLESGDASIHDTVENLIILANNSLSSNGNVTESGCKECEELEEKNIKEFLQSFVHIVQMFINTSTTTPAPRPPTPAPTIASQPLSLRPEACRPAAGGAVHTRGLDFACDIYIWAPLAGTCGVLLLSLVITLYC

SEQ ID NO: 189 - DNA, 2150 bp, Homo sapiens
  misc_feature: DNA NK19H-NF-8
gaattcgccgccaccatggccttaccagtgaccgccttgctcctgccgctggccttgctgctccacgccgccaggccggacatccagatgacacagagcccgtcctccctgtctgcctctgtgggagacagagtcaccatcacctgcagggcaagtcaggacattagtaaatatttaaattggtatcagcagaaaccaggtggaactgttaaactcctgatctaccatacatcaagattacactcaggagtcccatcaaggttcagtggcagtgggtctggaacagatttcaccctcaccattagcagcctgcaaccggaagatattgccacttacttctgccaacagggtaatacgcttccgtacacgttcggaggggggaccaagctggagatcacaggtggcggtggctcgggcggtggtgggtcgggtggcggcggatctcaggtgcagctgcaggagtcaggacctggcctggtgaaaccctcacagactctgtccgtgacatgcactgtctcaggggtctcattacccgactatggtgtaagctggattcgccagcctccaggtaagggtctggagtggctgggagtaatatggggtagtgaaaccacatactataattcagctctcaaatccagactgaccatctccaaggacaactccaagagccaagtttccttaaaattaagtagtgttactgctgctgacacagccgtctactactgtgccaaacattattactacggtggtagctatgctatggactactggggccaaggaacctcagtcaccgtctcctcaaccacgacgccagcgccgcgaccaccaacaccggcgcccaccatcgcgtcgcagcccctgtccctgcgcccagaggcgtgccggccagcggcggggggcgcagtgcacacgagggggctggacttcgcctgtgatatctacatctgggcgcccttggccgggacttgtggggtccttctcctgtcactggttatcaccctttactgccggagggaccagaggctgccccccgatgcccacaagccccctgggggaggcagtttccggacccccatccaagaggagcaggccgacgcccactccaccctggccaagatcagagtgaagttcagcaggagcgcagacgcccccgcgtaccagcagggccagaaccagctctataacgagctcaatctaggacgaagagaggagtacgatgttttggacaagagacgtggccgggaccctgagatggggggaaagccgagaaggaagaaccctcaggaaggcctgtacaatgaactgcagaaagataagatggcggaggcctacagtgagattgggatgaaaggcgagcgccggaggggcaaggggcacgatggcctttaccagggtctcagtacagccaccaaggacacctacgacgcccttcacatgcaggccctgccccctcgcggctctggcgagggaaggggttccctgcttacttgcggcgacgtcgaagagaatcccggtccgatggccctcccagtaactgccctccttttgcccctcgcactccttcttcatgccgctcgccccaactgggtcaacgtgattagcgatttgaagaaaatcgaggaccttatacagtctatgcatattgacgctacactgtatactgagagtgatgtacacccgtcctgtaaggtaacggccatgaaatgctttcttctggagctccaggtcatcagcttggagtctggggacgcaagcatccacgatacggttgaaaacctcatcatccttgcgaacaactctctctcatctaatggaaacgttacagagagtgggtgtaaggagtgcgaagagttggaagaaaaaaacatcaaagaatttcttcaatccttcgttcacatagtgcaaatgttcattaacacgtccactaccacacccgccccgaggccacctacgccggcaccgactatcgccagtcaacccctctctctgcgccccgaggcttgccggcctgcggctggtggggcggtccacacccggggcctggattttgcgtgcgatatatacatctgggcacctcttgccggcacctgcggagtgctgcttctctcactcgttattacgctgtactgctaagcggccgcgtcgac

SEQ ID NO: 190 - protein, 706 aa, Homo sapiens
  MISC_FEATURE: AA NK19H-NF-8
MALPVTALLLPLALLLHAARPDIQMTQSPSSLSASVGDRVTITCRASQDISKYLNWYQQKPGGTVKLLIYHTSRLHSGVPSRFSGSGSGTDFTLTISSLQPEDIATYFCQQGNTLPYTFGGGTKLEITGGGGSGGGGSGGGGSQVQLQESGPGLVKPSQTLSVTCTVSGVSLPDYGVSWIRQPPGKGLEWLGVIWGSETTYYNSALKSRLTISKDNSKSQVSLKLSSVTAADTAVYYCAKHYYYGGSYAMDYWGQGTSVTVSSTTTPAPRPPTPAPTIASQPLSLRPEACRPAAGGAVHTRGLDFACDIYIWAPLAGTCGVLLLSLVITLYCRRDQRLPPDAHKPPGGGSFRTPIQEEQADAHSTLAKIRVKFSRSADAPAYQQGQNQLYNELNLGRREEYDVLDKRRGRDPEMGGKPRRKNPQEGLYNELQKDKMAEAYSEIGMKGERRRGKGHDGLYQGLSTATKDTYDALHMQALPPRGSGEGRGSLLTCGDVEENPGPMALPVTALLLPLALLLHAARPNWVNVISDLKKIEDLIQSMHIDATLYTESDVHPSCKVTAMKCFLLELQVISLESGDASIHDTVENLIILANNSLSSNGNVTESGCKECEELEEKNIKEFLQSFVHIVQMFINTSTTTPAPRPPTPAPTIASQPLSLRPEACRPAAGGAVHTRGLDFACDIYIWAPLAGTCGVLLLSLVITLYC

SEQ ID NO: 191 - DNA, 2150 bp, Homo sapiens
  misc_feature: DNA NK19H-NF-9
gaattcgccgccaccatggccttaccagtgaccgccttgctcctgccgctggccttgctgctccacgccgccaggccggacatccagatgacacagagcccgtcctccctgtctgcctctgtgggagacagagtcaccatcacctgcagggcaagtcaggacattagtaaatatttaaattggtatcagcagaaaccagacggaactgttaaactcctgatctaccatacatcaagattacactcaggagtcccatcaaggttcagtggcagtgggtctggaacagattacaccctcaccattagcagcctgcaaccggaagatattgccacttacttctgccaacagggtaatacgcttccgtacacgttcggaggggggaccaagctggagatcacaggtggcggtggctcgggcggtggtgggtcgggtggcggcggatctcaggtgcagctgcaggagtcaggacctggcctggtgaaaccctcacagactctgtccgtgacatgcactgtctcaggggtctcattacccgactatggtgtaagctggattcgccagcctccaggtaagggtctggagtggctgggagtaatatggggtagtgaaaccacatactataattcagctctcaaatccagactgaccatctccaaggacaactccaagagccaagtttccttaaaattaagtagtgttactgctgctgacacagccgtctactactgtgccaaacattattactacggtggtagctatgctatggactactggggccaaggaacctcagtcaccgtctcctcaaccacgacgccagcgccgcgaccaccaacaccggcgcccaccatcgcgtcgcagcccctgtccctgcgcccagaggcgtgccggccagcggcggggggcgcagtgcacacgagggggctggacttcgcctgtgatatctacatctgggcgcccttggccgggacttgtggggtccttctcctgtcactggttatcaccctttactgccggagggaccagaggctgccccccgatgcccacaagccccctgggggaggcagtttccggacccccatccaagaggagcaggccgacgcccactccaccctggccaagatcagagtgaagttcagcaggagcgcagacgcccccgcgtaccagcagggccagaaccagctctataacgagctcaatctaggacgaagagaggagtacgatgttttggacaagagacgtggccgggaccctgagatggggggaaagccgagaaggaagaaccctcaggaaggcctgtacaatgaactgcagaaagataagatggcggaggcctacagtgagattgggatgaaaggcgagcgccggaggggcaaggggcacgatggcctttaccagggtctcagtacagccaccaaggacacctacgacgcccttcacatgcaggccctgccccctcgcggctctggcgagggaaggggttccctgcttacttgcggcgacgtcgaagagaatcccggtccgatggccctcccagtaactgccctccttttgcccctcgcactccttcttcatgccgctcgccccaactgggtcaacgtgattagcgatttgaagaaaatcgaggaccttatacagtctatgcatattgacgctacactgtatactgagagtgatgtacacccgtcctgtaaggtaacggccatgaaatgctttcttctggagctccaggtcatcagcttggagtctggggacgcaagcatccacgatacggttgaaaacctcatcatccttgcgaacaactctctctcatctaatggaaacgttacagagagtgggtgtaaggagtgcgaagagttggaagaaaaaaacatcaaagaatttcttcaatccttcgttcacatagtgcaaatgttcattaacacgtccactaccacacccgccccgaggccacctacgccggcaccgactatcgccagtcaacccctctctctgcgccccgaggcttgccggcctgcggctggtggggcggtccacacccggggcctggattttgcgtgcgatatatacatctgggcacctcttgccggcacctgcggagtgctgcttctctcactcgttattacgctgtactgctaagcggccgcgtcgac

SEQ ID NO: 192 - protein, 706 aa, Homo sapiens
  MISC_FEATURE: AA NK19H-NF-9
MALPVTALLLPLALLLHAARPDIQMTQSPSSLSASVGDRVTITCRASQDISKYLNWYQQKPDGTVKLLIYHTSRLHSGVPSRFSGSGSGTDYTLTISSLQPEDIATYFCQQGNTLPYTFGGGTKLEITGGGGSGGGGSGGGGSQVQLQESGPGLVKPSQTLSVTCTVSGVSLPDYGVSWIRQPPGKGLEWLGVIWGSETTYYNSALKSRLTISKDNSKSQVSLKLSSVTAADTAVYYCAKHYYYGGSYAMDYWGQGTSVTVSSTTTPAPRPPTPAPTIASQPLSLRPEACRPAAGGAVHTRGLDFACDIYIWAPLAGTCGVLLLSLVITLYCRRDQRLPPDAHKPPGGGSFRTPIQEEQADAHSTLAKIRVKFSRSADAPAYQQGQNQLYNELNLGRREEYDVLDKRRGRDPEMGGKPRRKNPQEGLYNELQKDKMAEAYSEIGMKGERRRGKGHDGLYQGLSTATKDTYDALHMQALPPRGSGEGRGSLLTCGDVEENPGPMALPVTALLLPLALLLHAARPNWVNVISDLKKIEDLIQSMHIDATLYTESDVHPSCKVTAMKCFLLELQVISLESGDASIHDTVENLIILANNSLSSNGNVTESGCKECEELEEKNIKEFLQSFVHIVQMFINTSTTTPAPRPPTPAPTIASQPLSLRPEACRPAAGGAVHTRGLDFACDIYIWAPLAGTCGVLLLSLVITLYC

SEQ ID NO: 193 - DNA, 2150 bp, Homo sapiens
  misc_feature: DNA NK19H-NF-10
gaattcgccgccaccatggccttaccagtgaccgccttgctcctgccgctggccttgctgctccacgccgccaggccggatattcagatgacccagagcccgagcagcctgagcgcgagcgtgggcgatcgcgtgaccattacctgccgcgcgagccaggatattagcaaatatctgaactggtatcagcagaaaccgggcggcaccgtgaaactgctgatttatcataccagccgcctgcatagcggcgtgccgagccgctttagcggcagcggcagcggcaccgattttaccctgaccattagcagcctgcagccggaagatattgcgacctattattgccagcagggcaacaccctgccgtatacctttggcggcggcaccaaactggaaattaccggtggcggtggctcgggcggtggtgggtcgggtggcggcggatctcaggtgcagctgcaggaaagcggcccgggcctggtgaaaccgagccagaccctgagcgtgacctgcaccgtgagcggcgtgagcctgccggattatggcgtgagctggattcgccagccgccgcgcaaaggcctggaatggctgggcgtgatttggggcagcgaaaccacctattataacagcgcgctgaaaagccgcctgaccattagcaaagataacagcaaaagccaggtgagcctgaaaatgagcagcgtgaccgcggcggataccgcgatttattattgcgcgaaacattattattatggcggcagctatgcgatggattattggggccagggcaccagcgtgaccgtgagcagcaccacgacgccagcgccgcgaccaccaacaccggcgcccaccatcgcgtcgcagcccctgtccctgcgcccagaggcgtgccggccagcggcggggggcgcagtgcacacgagggggctggacttcgcctgtgatatctacatctgggcgcccttggccgggacttgtggggtccttctcctgtcactggttatcaccctttactgccggagggaccagaggctgccccccgatgcccacaagccccctgggggaggcagtttccggacccccatccaagaggagcaggccgacgcccactccaccctggccaagatcagagtgaagttcagcaggagcgcagacgcccccgcgtaccagcagggccagaaccagctctataacgagctcaatctaggacgaagagaggagtacgatgttttggacaagagacgtggccgggaccctgagatggggggaaagccgagaaggaagaaccctcaggaaggcctgtacaatgaactgcagaaagataagatggcggaggcctacagtgagattgggatgaaaggcgagcgccggaggggcaaggggcacgatggcctttaccagggtctcagtacagccaccaaggacacctacgacgcccttcacatgcaggccctgccccctcgcggctctggcgagggaaggggttccctgcttacttgcggcgacgtcgaagagaatcccggtccgatggccctcccagtaactgccctccttttgcccctcgcactccttcttcatgccgctcgccccaactgggtcaacgtgattagcgatttgaagaaaatcgaggaccttatacagtctatgcatattgacgctacactgtatactgagagtgatgtacacccgtcctgtaaggtaacggccatgaaatgctttcttctggagctccaggtcatcagcttggagtctggggacgcaagcatccacgatacggttgaaaacctcatcatccttgcgaacaactctctctcatctaatggaaacgttacagagagtgggtgtaaggagtgcgaagagttggaagaaaaaaacatcaaagaatttcttcaatccttcgttcacatagtgcaaatgttcattaacacgtccactaccacacccgccccgaggccacctacgccggcaccgactatcgccagtcaacccctctctctgcgccccgaggcttgccggcctgcggctggtggggcggtccacacccggggcctggattttgcgtgcgatatatacatctgggcacctcttgccggcacctgcggagtgctgcttctctcactcgttattacgctgtactgctaagcggccgcgtcgac

SEQ ID NO: 194 - protein, 706 aa, Homo sapiens
  MISC_FEATURE: AA NK19H-NF-10
MALPVTALLLPLALLLHAARPDIQMTQSPSSLSASVGDRVTITCRASQDISKYLNWYQQKPGGTVKLLIYHTSRLHSGVPSRFSGSGSGTDFTLTISSLQPEDIATYYCQQGNTLPYTFGGGTKLEITGGGGSGGGGSGGGGSQVQLQESGPGLVKPSQTLSVTCTVSGVSLPDYGVSWIRQPPRKGLEWLGVIWGSETTYYNSALKSRLTISKDNSKSQVSLKMSSVTAADTAIYYCAKHYYYGGSYAMDYWGQGTSVTVSSTTTPAPRPPTPAPTIASQPLSLRPEACRPAAGGAVHTRGLDFACDIYIWAPLAGTCGVLLLSLVITLYCRRDQRLPPDAHKPPGGGSFRTPIQEEQADAHSTLAKIRVKFSRSADAPAYQQGQNQLYNELNLGRREEYDVLDKRRGRDPEMGGKPRRKNPQEGLYNELQKDKMAEAYSEIGMKGERRRGKGHDGLYQGLSTATKDTYDALHMQALPPRGSGEGRGSLLTCGDVEENPGPMALPVTALLLPLALLLHAARPNWVNVISDLKKIEDLIQSMHIDATLYTESDVHPSCKVTAMKCFLLELQVISLESGDASIHDTVENLIILANNSLSSNGNVTESGCKECEELEEKNIKEFLQSFVHIVQMFINTSTTTPAPRPPTPAPTIASQPLSLRPEACRPAAGGAVHTRGLDFACDIYIWAPLAGTCGVLLLSLVITLYC

SEQ ID NO: 195 - DNA, 2150 bp, Homo sapiens
  misc_feature: DNA NK19H-NF-11
gaattcgccgccaccatggccttaccagtgaccgccttgctcctgccgctggccttgctgctccacgccgccaggccggatattcagatgacccagagcccgagcagcctgagcgcgagcgtgggcgatcgcgtgaccattacctgccgcgcgagccaggatattagcaaatatctgaactggtatcagcagaaaccgggcggcaccgtgaaactgctgatttatcataccagccgcctgcatagcggcgtgccgagccgctttagcggcagcggcagcggcaccgattttaccctgaccattagcagcctgcagccggaagatattgcgacctatttttgccagcagggcaacaccctgccgtatacctttggcggcggcaccaaactggaaattaccggtggcggtggctcgggcggtggtgggtcgggtggcggcggatctcaggtgcagctgcaggaaagcggcccgggcctggtgaaaccgagccagaccctgagcgtgacctgcaccgtgagcggcgtgagcctgccggattatggcgtgagctggattcgccagccgccgcgcaaaggcctggaatggctgggcgtgatttggggcagcgaaaccacctattataacagcgcgctgaaaagccgcctgaccattagcaaagataacagcaaaagccaggtgagcctgaaaatgagcagcgtgaccgcggcggataccgcgatttattattgcgcgaaacattattattatggcggcagctatgcgatggattattggggccagggcaccagcgtgaccgtgagcagcaccacgacgccagcgccgcgaccaccaacaccggcgcccaccatcgcgtcgcagcccctgtccctgcgcccagaggcgtgccggccagcggcggggggcgcagtgcacacgagggggctggacttcgcctgtgatatctacatctgggcgcccttggccgggacttgtggggtccttctcctgtcactggttatcaccctttactgccggagggaccagaggctgccccccgatgcccacaagccccctgggggaggcagtttccggacccccatccaagaggagcaggccgacgcccactccaccctggccaagatcagagtgaagttcagcaggagcgcagacgcccccgcgtaccagcagggccagaaccagctctataacgagctcaatctaggacgaagagaggagtacgatgttttggacaagagacgtggccgggaccctgagatggggggaaagccgagaaggaagaaccctcaggaaggcctgtacaatgaactgcagaaagataagatggcggaggcctacagtgagattgggatgaaaggcgagcgccggaggggcaaggggcacgatggcctttaccagggtctcagtacagccaccaaggacacctacgacgcccttcacatgcaggccctgccccctcgcggctctggcgagggaaggggttccctgcttacttgcggcgacgtcgaagagaatcccggtccgatggccctcccagtaactgccctccttttgcccctcgcactccttcttcatgccgctcgccccaactgggtcaacgtgattagcgatttgaagaaaatcgaggaccttatacagtctatgcatattgacgctacactgtatactgagagtgatgtacacccgtcctgtaaggtaacggccatgaaatgctttcttctggagctccaggtcatcagcttggagtctggggacgcaagcatccacgatacggttgaaaacctcatcatccttgcgaacaactctctctcatctaatggaaacgttacagagagtgggtgtaaggagtgcgaagagttggaagaaaaaaacatcaaagaatttcttcaatccttcgttcacatagtgcaaatgttcattaacacgtccactaccacacccgccccgaggccacctacgccggcaccgactatcgccagtcaacccctctctctgcgccccgaggcttgccggcctgcggctggtggggcggtccacacccggggcctggattttgcgtgcgatatatacatctgggcacctcttgccggcacctgcggagtgctgcttctctcactcgttattacgctgtactgctaagcggccgcgtcgac

SEQ ID NO: 196 - protein, 706 aa, Homo sapiens
  MISC_FEATURE: AA NK19H-NF-11
MALPVTALLLPLALLLHAARPDIQMTQSPSSLSASVGDRVTITCRASQDISKYLNWYQQKPGGTVKLLIYHTSRLHSGVPSRFSGSGSGTDFTLTISSLQPEDIATYFCQQGNTLPYTFGGGTKLEITGGGGSGGGGSGGGGSQVQLQESGPGLVKPSQTLSVTCTVSGVSLPDYGVSWIRQPPRKGLEWLGVIWGSETTYYNSALKSRLTISKDNSKSQVSLKMSSVTAADTAIYYCAKHYYYGGSYAMDYWGQGTSVTVSSTTTPAPRPPTPAPTIASQPLSLRPEACRPAAGGAVHTRGLDFACDIYIWAPLAGTCGVLLLSLVITLYCRRDQRLPPDAHKPPGGGSFRTPIQEEQADAHSTLAKIRVKFSRSADAPAYQQGQNQLYNELNLGRREEYDVLDKRRGRDPEMGGKPRRKNPQEGLYNELQKDKMAEAYSEIGMKGERRRGKGHDGLYQGLSTATKDTYDALHMQALPPRGSGEGRGSLLTCGDVEENPGPMALPVTALLLPLALLLHAARPNWVNVISDLKKIEDLIQSMHIDATLYTESDVHPSCKVTAMKCFLLELQVISLESGDASIHDTVENLIILANNSLSSNGNVTESGCKECEELEEKNIKEFLQSFVHIVQMFINTSTTTPAPRPPTPAPTIASQPLSLRPEACRPAAGGAVHTRGLDFACDIYIWAPLAGTCGVLLLSLVITLYC

SEQ ID NO: 197 - DNA, 2150 bp, Homo sapiens
  misc_feature: DNA NK19H-NF-12
gaattcgccgccaccatggccttaccagtgaccgccttgctcctgccgctggccttgctgctccacgccgccaggccggatattcagatgacccagagcccgagcagcctgagcgcgagcgtgggcgatcgcgtgaccattacctgccgcgcgagccaggatattagcaaatatctgaactggtatcagcagaaaccggatggcaccgtgaaactgctgatttatcataccagccgcctgcatagcggcgtgccgagccgctttagcggcagcggcagcggcaccgattataccctgaccattagcagcctgcagccggaagatattgcgacctatttttgccagcagggcaacaccctgccgtatacctttggcggcggcaccaaactggaaattaccggtggcggtggctcgggcggtggtgggtcgggtggcggcggatctcaggtgcagctgcaggaaagcggcccgggcctggtgaaaccgagccagaccctgagcgtgacctgcaccgtgagcggcgtgagcctgccggattatggcgtgagctggattcgccagccgccgcgcaaaggcctggaatggctgggcgtgatttggggcagcgaaaccacctattataacagcgcgctgaaaagccgcctgaccattagcaaagataacagcaaaagccaggtgagcctgaaaatgagcagcgtgaccgcggcggataccgcgatttattattgcgcgaaacattattattatggcggcagctatgcgatggattattggggccagggcaccagcgtgaccgtgagcagcaccacgacgccagcgccgcgaccaccaacaccggcgcccaccatcgcgtcgcagcccctgtccctgcgcccagaggcgtgccggccagcggcggggggcgcagtgcacacgagggggctggacttcgcctgtgatatctacatctgggcgcccttggccgggacttgtggggtccttctcctgtcactggttatcaccctttactgccggagggaccagaggctgccccccgatgcccacaagccccctgggggaggcagtttccggacccccatccaagaggagcaggccgacgcccactccaccctggccaagatcagagtgaagttcagcaggagcgcagacgcccccgcgtaccagcagggccagaaccagctctataacgagctcaatctaggacgaagagaggagtacgatgttttggacaagagacgtggccgggaccctgagatggggggaaagccgagaaggaagaaccctcaggaaggcctgtacaatgaactgcagaaagataagatggcggaggcctacagtgagattgggatgaaaggcgagcgccggaggggcaaggggcacgatggcctttaccagggtctcagtacagccaccaaggacacctacgacgcccttcacatgcaggccctgccccctcgcggctctggcgagggaaggggttccctgcttacttgcggcgacgtcgaagagaatcccggtccgatggccctcccagtaactgccctccttttgcccctcgcactccttcttcatgccgctcgccccaactgggtcaacgtgattagcgatttgaagaaaatcgaggaccttatacagtctatgcatattgacgctacactgtatactgagagtgatgtacacccgtcctgtaaggtaacggccatgaaatgctttcttctggagctccaggtcatcagcttggagtctggggacgcaagcatccacgatacggttgaaaacctcatcatccttgcgaacaactctctctcatctaatggaaacgttacagagagtgggtgtaaggagtgcgaagagttggaagaaaaaaacatcaaagaatttcttcaatccttcgttcacatagtgcaaatgttcattaacacgtccactaccacacccgccccgaggccacctacgccggcaccgactatcgccagtcaacccctctctctgcgccccgaggcttgccggcctgcggctggtggggcggtccacacccggggcctggattttgcgtgcgatatatacatctgggcacctcttgccggcacctgcggagtgctgcttctctcactcgttattacgctgtactgctaagcggccgcgtcgac

SEQ ID NO: 198 - protein, 706 aa, Homo sapiens
  MISC_FEATURE: AA NK19H-NF-12
MALPVTALLLPLALLLHAARPDIQMTQSPSSLSASVGDRVTITCRASQDISKYLNWYQQKPDGTVKLLIYHTSRLHSGVPSRFSGSGSGTDYTLTISSLQPEDIATYFCQQGNTLPYTFGGGTKLEITGGGGSGGGGSGGGGSQVQLQESGPGLVKPSQTLSVTCTVSGVSLPDYGVSWIRQPPRKGLEWLGVIWGSETTYYNSALKSRLTISKDNSKSQVSLKMSSVTAADTAIYYCAKHYYYGGSYAMDYWGQGTSVTVSSTTTPAPRPPTPAPTIASQPLSLRPEACRPAAGGAVHTRGLDFACDIYIWAPLAGTCGVLLLSLVITLYCRRDQRLPPDAHKPPGGGSFRTPIQEEQADAHSTLAKIRVKFSRSADAPAYQQGQNQLYNELNLGRREEYDVLDKRRGRDPEMGGKPRRKNPQEGLYNELQKDKMAEAYSEIGMKGERRRGKGHDGLYQGLSTATKDTYDALHMQALPPRGSGEGRGSLLTCGDVEENPGPMALPVTALLLPLALLLHAARPNWVNVISDLKKIEDLIQSMHIDATLYTESDVHPSCKVTAMKCFLLELQVISLESGDASIHDTVENLIILANNSLSSNGNVTESGCKECEELEEKNIKEFLQSFVHIVQMFINTSTTTPAPRPPTPAPTIASQPLSLRPEACRPAAGGAVHTRGLDFACDIYIWAPLAGTCGVLLLSLVITLYC

SEQ ID NO: 199 - protein, 17 aa, Artificial Sequence
  Synthetic
  MISC_FEATURE: CKS-17 consensus AA
LQNRRGLDLLFLKEGGL

SEQ ID NO: 200 - protein, 27 aa, Murine leukemia virus
  MISC_FEATURE: MoLV p15E
LQNRRGLDLLFLKEGGLCAALKEECCF

SEQ ID NO: 201 - protein, 27 aa, Friend murine leukemia virus
  MISC_FEATURE: FLV p15E
LQNRRGLDLLFLKEGGLCAALKEECCF

SEQ ID NO: 202 - protein, 27 aa, Murine leukemia virus
  MISC_FEATURE: AKV p15E
LQNRRGLDLLFLKEGGLCAALKEECCF

SEQ ID NO: 203 - protein, 27 aa, Artificial Sequence
  Synthetic
  MISC_FEATURE: GLV p15E
LQNRRGLDLLFLKEGGLCAALKEECCF

SEQ ID NO: 204 - protein, 27 aa, Mink cell focus-forming virus
  MISC_FEATURE: MMCF p15E
LQNRRGLDLLFLKEGGLCAALKEECCF

SEQ ID NO: 205 - protein, 27 aa, Mink cell focus-forming virus
  MISC_FEATURE: AMCF p15E
LQNRRGLDLLFLKEGGLCAALKEECCF

SEQ ID NO: 206 - protein, 27 aa, Feline leukemia virus
  MISC_FEATURE: FeLV p15E
LQNRRGLDLLFLQEGGLCAALKEECCF

SEQ ID NO: 207 - protein, 27 aa, Mason-Pfizer monkey virus
  MISC_FEATURE: MPMV gp20
LQNRRGLDLLTAEQGGICLALQEKCCF

SEQ ID NO: 208 - protein, 27 aa, Artificial Sequence
  Synthetic
  MISC_FEATURE: REV-A gp20
LQNRRGLDLLTAEQGGICLALQEKCCF

SEQ ID NO: 209 - protein, 27 aa, Human T-cell lymphotropic virus type 1
  MISC_FEATURE: HTLV-1 gp21
AQNRRGLDLLFWEQGGLCKALQEQCRF

SEQ ID NO: 210 - protein, 27 aa, Human T-cell lymphotropic virus type 2
  MISC_FEATURE: HTLV-II gp21
AQNRRGLDLLFWEQGGLCKAIQEQCCF

SEQ ID NO: 211 - protein, 19 aa, Human immunodeficiency virus type 1
  MISC_FEATURE: HIV-1 NEF
MTYKAAVDLSHFLKEKGGL

SEQ ID NO: 212 - protein, 17 aa, Human immunodeficiency virus type 1
  MISC_FEATURE: HIV-1 gp41
LQARVLAVERYLKDQQL

SEQ ID NO: 213 - protein, 17 aa, Murine endogenous retrovirus
  MISC_FEATURE: B26 retrovirus
  MISC_FEATURE (13)..(13): X is lysine or glutamic acid
  MISC_FEATURE (14)..(14): X is glutamic acid or lysine
LQNKRGLDLLFLXXGGL

SEQ ID NO: 214 - protein, 17 aa, Baboon endogenous virus
  MISC_FEATURE: BaEV retrovirus
  MISC_FEATURE (17)..(17): X is Leucine or Isoleucine
LQNRRGLDLLTAEQGGX

SEQ ID NO: 215 - protein, 17 aa, Human endogenous retrovirus
  MISC_FEATURE: human endogenous retrovirus
  MISC_FEATURE (1)..(1): X is Leucine or Tyrosine
  MISC_FEATURE (5)..(5): X is absent or Leucine
  MISC_FEATURE (6)..(6): X is Glycine or Alanine
  MISC_FEATURE (8)..(8): X is Aspartic Acid or Asparagine
  MISC_FEATURE (9)..(9): X is Leucine or Tyrosine
  MISC_FEATURE (10)..(10): X is Leucine or Serine
  misc_feature (11)..(11): Xaa can be any naturally occurring amino acid
  MISC_FEATURE (13)..(13): X is Glutamic acid, Glutamine, or Alanine
  MISC_FEATURE (14)..(14): X is Glutamic acid or Lysine
  MISC_FEATURE (15)..(15): X is Glycine or Glutamic acid
  MISC_FEATURE (17)..(17): X is Leucine or Valine
XQNRXXLXXXXAXXXGX

SEQ ID NO: 216 - DNA, 51 bp, Artificial Sequence
  Synthetic
  misc_feature: CKS-17 consensus DNA
ctgcaaaacagaaggggattagacctgctttttcttaaagagggagggctc

SEQ ID NO: 217 - DNA, 5 bp, Artificial Sequence
  Synthetic
  misc_feature: mbCKS-17 GFP DNA
artca

SEQ ID NO: 218 - protein, 107 aa, Artificial Sequence
  Synthetic
  MISC_FEATURE: mbCKS-17 AA
MALPVTALLLPLALLLHAARPLQNRRGLDLLFLKEGGLTTTPAPRPPTPAPTIASQPLSLRPEACRPAAGGAVHTRGLDFACDIYIWAPLAGTCGVLLLSLVITLYC

SEQ ID NO: 219 - DNA, 321 bp, Artificial Sequence
  Synthetic
  misc_feature: mbCKS-17 DNA
atggcactccccgtaactgctctgctgctgccgttggcattgctcctgcacgccgcacgcccgctgcaaaacagaaggggattagacctgctttttcttaaagagggagggctcaccacgacgccagcgccgcgaccaccaacaccggcgcccaccatcgcgtcgcagcccctgtccctgcgcccagaggcgtgccggccagcggcggggggcgcagtgcacacgagggggctggacttcgcctgtgatatctacatctgggcgcccttggccgggacttgtggggtccttctcctgtcactggttatcaccctttactgc

SEQ ID NO: 220 - protein, 28 aa, Artificial Sequence
  Synthetic
  MISC_FEATURE: p15E AA
LQNRRGLDLLFLKEGGLCAALKEECCFY

SEQ ID NO: 221 - DNA, 84 bp, Viral consensus sequence
  misc_feature: p15E DNA
ctgcaaaacagaaggggattagacctgctttttcttaaagagggagggctctgtgctgccttaaaggaagaatgttgcttttat

SEQ ID NO: 222 - DNA, 1626 bp, Artificial Sequence
  Synthetic
  misc_feature: p15E-L-8aHTM_IRES_GFP DNA
atggcactccccgtaactgctctgctgctgccgttggcattgctcctgcacgccgcacgcccgctgcaaaacagaaggggattagacctgctttttcttaaagagggagggctctgtgctgccttaaaggaagaatgttgcttttataccacgacgccagcgccgcgaccaccaacaccggcgcccaccatcgcgtcgcagcccctgtccctgcgcccagaggcgtgccggccagcggcggggggcgcagtgcacacgagggggctggacttcgcctgtgatatctacatctgggcgcccttggccgggacttgtggggtccttctcctgtcactggttatcaccctttactgcacgttactggccgaagccgcttggaataaggccggtgtgcgtttgtctatatgttattttccaccatattgccgtcttttggcaatgtgagggcccggaaacctggccctgtcttcttgacgagcattcctaggggtctttcccctctcgccaaaggaatgcaaggtctgttgaatgtcgtgaaggaagcagttcctctggaagcttcttgaagacaaacaacgtctgtagcgaccctttgcaggcagcggaaccccccacctggcgacaggtgcctctgcggccaaaagccacgtgtataagatacacctgcaaaggcggcacaaccccagtgccacgttgtgagttggatagttgtggaaagagtcaaatggctctcctcaagcgtattcaacaaggggctgaaggatgcccagaaggtaccccattgtatgggatctgatctggggcctcggtgcacatgctttacatgtgtttagtcgaggttaaaaaaacgtctaggccccccgaaccacggggacgtggttttcctttgaaaaacacgataataccatggtgagcaagggcgaggagctgttcaccggggtggtgcccatcctggtcgagctggacggcgacgtaaacggccacaagttcagcgtgtccggcgagggcgagggcgatgccacctacggcaagctgaccctgaagttcatctgcaccaccggcaagctgcccgtgccctggcccaccctcgtgaccaccctgacctacggcgtgcagtgcttcagccgctaccccgaccacatgaagcagcacgacttcttcaagtccgccatgcccgaaggctacgtccaggagcgcaccatcttcttcaaggacgacggcaactacaagacccgcgccgaggtgaagttcgagggcgacaccctggtgaaccgcatcgagctgaagggcatcgacttcaaggaggacggcaacatcctggggcacaagctggagtacaactacaacagccacaacgtctatatcatggccgacaagcagaagaacggcatcaaggtgaacttcaagatccgccacaacatcgaggacggcagcgtgcagctcgccgaccactaccagcagaacacccccatcggcgacggccccgtgctgctgcccgacaaccactacctgagcacccagtccgccctgagcaaagaccccaacgagaagcgcgatcacatggtcctgctggagttcgtgaccgccgccgggatcactctcggcatggacgagctgtacaagtaa

SEQ ID NO: 223 - protein, 117 aa, Artificial Sequence
  Synthetic
  MISC_FEATURE: p15E-L-8aHTM AA
MALPVTALLLPLALLLHAARPLQNRRGLDLLFLKEGGLCAALKEECCFTTTPAPRPPTPAPTIASQPLSLRPEACRPAAGGAVHTRGLDFACDIYIWAPLAGTCGVLLLSLVITLYC

SEQ ID NO: 224 - DNA, 354 bp, Artificial Sequence
  Synthetic
  misc_feature: p15E-L-8aHTM DNA
atggcactccccgtaactgctctgctgctgccgttggcattgctcctgcacgccgcacgcccgctgcaaaacagaaggggattagacctgctttttcttaaagagggagggctctgtgctgccttaaaggaagaatgttgcttttataccacgacgccagcgccgcgaccaccaacaccggcgcccaccatcgcgtcgcagcccctgtccctgcgcccagaggcgtgccggccagcggcggggggcgcagtgcacacgagggggctggacttcgcctgtgatatctacatctgggcgcccttggccgggacttgtggggtccttctcctgtcactggttatcaccctttactgc

SEQ ID NO: 225 - protein, 28 aa, Human T-cell lymphotropic virus type 1
  MISC_FEATURE: HTLV-I AA
AQNRRGLDLLFWEQGGLCKALQEQCRFP

SEQ ID NO: 226 - DNA, 84 bp, Human T-cell lymphotropic virus type 1
  misc_feature: HTLV-1 DNA
gcccagaacagacgaggccttgatctcctattctgggagcaaggaggattatgcaaagcattacaagaacagtgccgttttccg

SEQ ID NO: 227 - DNA, 1626 bp, Artificial Sequence
  Synthetic
  misc_feature: HTLV-8aHTM_IRES_GFP DNA
atggcactccccgtaactgctctgctgctgccgttggcattgctcctgcacgccgcacgcccggcccagaacagacgaggccttgatctcctattctgggagcaaggaggattatgcaaagcattacaagaacagtgccgttttccgaccacgacgccagcgccgcgaccaccaacaccggcgcccaccatcgcgtcgcagcccctgtccctgcgcccagaggcgtgccggccagcggcggggggcgcagtgcacacgagggggctggacttcgcctgtgatatctacatctgggcgcccttggccgggacttgtggggtccttctcctgtcactggttatcaccctttactgcacgttactggccgaagccgcttggaataaggccggtgtgcgtttgtctatatgttattttccaccatattgccgtcttttggcaatgtgagggcccggaaacctggccctgtcttcttgacgagcattcctaggggtctttcccctctcgccaaaggaatgcaaggtctgttgaatgtcgtgaaggaagcagttcctctggaagcttcttgaagacaaacaacgtctgtagcgaccctttgcaggcagcggaaccccccacctggcgacaggtgcctctgcggccaaaagccacgtgtataagatacacctgcaaaggcggcacaaccccagtgccacgttgtgagttggatagttgtggaaagagtcaaatggctctcctcaagcgtattcaacaaggggctgaaggatgcccagaaggtaccccattgtatgggatctgatctggggcctcggtgcacatgctttacatgtgtttagtcgaggttaaaaaaacgtctaggccccccgaaccacggggacgtggttttcctttgaaaaacacgataataccatggtgagcaagggcgaggagctgttcaccggggtggtgcccatcctggtcgagctggacggcgacgtaaacggccacaagttcagcgtgtccggcgagggcgagggcgatgccacctacggcaagctgaccctgaagttcatctgcaccaccggcaagctgcccgtgccctggcccaccctcgtgaccaccctgacctacggcgtgcagtgcttcagccgctaccccgaccacatgaagcagcacgacttcttcaagtccgccatgcccgaaggctacgtccaggagcgcaccatcttcttcaaggacgacggcaactacaagacccgcgccgaggtgaagttcgagggcgacaccctggtgaaccgcatcgagctgaagggcatcgacttcaaggaggacggcaacatcctggggcacaagctggagtacaactacaacagccacaacgtctatatcatggccgacaagcagaagaacggcatcaaggtgaacttcaagatccgccacaacatcgaggacggcagcgtgcagctcgccgaccactaccagcagaacacccccatcggcgacggccccgtgctgctgcccgacaaccactacctgagcacccagtccgccctgagcaaagaccccaacgagaagcgcgatcacatggtcctgctggagttcgtgaccgccgccgggatcactctcggcatggacgagctgtacaagtaa

SEQ ID NO: 228 - protein, 104 aa, Artificial Sequence
  Synthetic
  MISC_FEATURE: HTLV-8aHTM AA
MALPVTALLLPLALLLHAARPAQNRRGLDLLFWEQTTTPAPRPPTPAPTIASQPLSLRPEACRPAAGGAVHTRGLDFACDIYIWAPLAGTCGVLLLSLVITLYC

SEQ ID NO: 229 - DNA, 354 bp, Artificial Sequence
  Synthetic
  misc_feature: HTLV-8aHTM DNA
atggcactccccgtaactgctctgctgctgccgttggcattgctcctgcacgccgcacgcccggcccagaacagacgaggccttgatctcctattctgggagcaaggaggattatgcaaagcattacaagaacagtgccgttttccgaccacgacgccagcgccgcgaccaccaacaccggcgcccaccatcgcgtcgcagcccctgtccctgcgcccagaggcgtgccggccagcggcggggggcgcagtgcacacgagggggctggacttcgcctgtgatatctacatctgggcgcccttggccgggacttgtggggtccttctcctgtcactggttatcaccctttactgc

SEQ ID NO: 230 - protein, 75 aa, Human immunodeficiency virus
  MISC_FEATURE: HIV L gp41 AA
GALFLGFLGAAGSTMGAASVTLTVQARQLLSGIVQQQSNLLRAIEAQQHMLQLTVWGIKQLQARVLAVERYLKDQ

SEQ ID NO: 231 - DNA, 225 bp, Human immunodeficiency virus
  misc_feature: HIV L gp41 DNA
ggagctttrttccttgggttcttgggagcagcaggaagcactatgggcgcagcgtcagtgacgctgacggtacaggccagacaattaytgtctggtatagtgcarcagcagagcaatttgctgagagctattgaggcgcaacagcatatgttgcaactcacagtctggggcatyaaacagctccaggcaagagtcctggctgtggaaagatacctaaaggatcaa

SEQ ID NO: 232 - DNA, 1767 bp, Artificial Sequence
  Synthetic
  misc_feature: HIV_L-8aHTM_IRES_GFP DNA
atggcactccccgtaactgctctgctgctgccgttggcattgctcctgcacgccgcacgcccgggagctttrttccttgggttcttgggagcagcaggaagcactatgggcgcagcgtcagtgacgctgacggtacaggccagacaattaytgtctggtatagtgcarcagcagagcaatttgctgagagctattgaggcgcaacagcatatgttgcaactcacagtctggggcatyaaacagctccaggcaagagtcctggctgtggaaagatacctaaaggatcaaaccacgacgccagcgccgcgaccaccaacaccggcgcccaccatcgcgtcgcagcccctgtccctgcgcccagaggcgtgccggccagcggcggggggcgcagtgcacacgagggggctggacttcgcctgtgatatctacatctgggcgcccttggccgggacttgtggggtccttctcctgtcactggttatcaccctttactgcacgttactggccgaagccgcttggaataaggccggtgtgcgtttgtctatatgttattttccaccatattgccgtcttttggcaatgtgagggcccggaaacctggccctgtcttcttgacgagcattcctaggggtctttcccctctcgccaaaggaatgcaaggtctgttgaatgtcgtgaaggaagcagttcctctggaagcttcttgaagacaaacaacgtctgtagcgaccctttgcaggcagcggaaccccccacctggcgacaggtgcctctgcggccaaaagccacgtgtataagatacacctgcaaaggcggcacaaccccagtgccacgttgtgagttggatagttgtggaaagagtcaaatggctctcctcaagcgtattcaacaaggggctgaaggatgcccagaaggtaccccattgtatgggatctgatctggggcctcggtgcacatgctttacatgtgtttagtcgaggttaaaaaaacgtctaggccccccgaaccacggggacgtggttttcctttgaaaaacacgataataccatggtgagcaagggcgaggagctgttcaccggggtggtgcccatcctggtcgagctggacggcgacgtaaacggccacaagttcagcgtgtccggcgagggcgagggcgatgccacctacggcaagctgaccctgaagttcatctgcaccaccggcaagctgcccgtgccctggcccaccctcgtgaccaccctgacctacggcgtgcagtgcttcagccgctaccccgaccacatgaagcagcacgacttcttcaagtccgccatgcccgaaggctacgtccaggagcgcaccatcttcttcaaggacgacggcaactacaagacccgcgccgaggtgaagttcgagggcgacaccctggtgaaccgcatcgagctgaagggcatcgacttcaaggaggacggcaacatcctggggcacaagctggagtacaactacaacagccacaacgtctatatcatggccgacaagcagaagaacggcatcaaggtgaacttcaagatccgccacaacatcgaggacggcagcgtgcagctcgccgaccactaccagcagaacacccccatcggcgacggccccgtgctgctgcccgacaaccactacctgagcacccagtccgccctgagcaaagaccccaacgagaagcgcgatcacatggtcctgctggagttcgtgaccgccgccgggatcactctcggcatggacgagctgtacaagtaa

SEQ ID NO: 233 - protein, 165 aa, Artificial Sequence
  Synthetic
  MISC_FEATURE: HIV_L-8aHTM AA
MALPVTALLLPLALLLHAARPGALFLGFLGAAGSTMGAASVTLTVQARQLLSGIVQQQSNLLRAIEAQQHMLQLTVWGIKQLQARVLAVERYLKDQTTTPAPRPPTPAPTIASQPLSLRPEACRPAAGGAVHTRGLDFACDIYIWAPLAGTCGVLLLSLVITLYC

SEQ ID NO: 234 - DNA, 495 bp, Artificial Sequence
  Synthetic
  misc_feature: HIV_L-8aHTM DNA
atggcactccccgtaactgctctgctgctgccgttggcattgctcctgcacgccgcacgcccgggagctttrttccttgggttcttgggagcagcaggaagcactatgggcgcagcgtcagtgacgctgacggtacaggccagacaattaytgtctggtatagtgcarcagcagagcaatttgctgagagctattgaggcgcaacagcatatgttgcaactcacagtctggggcatyaaacagctccaggcaagagtcctggctgtggaaagatacctaaaggatcaaaccacgacgccagcgccgcgaccaccaacaccggcgcccaccatcgcgtcgcagcccctgtccctgcgcccagaggcgtgccggccagcggcggggggcgcagtgcacacgagggggctggacttcgcctgtgatatctacatctgggcgcccttggccgggacttgtggggtccttctcctgtcactggttatcaccctttactgc

SEQ ID NO: 235 - protein, 14 aa, Human immunodeficiency virus
  MISC_FEATURE: HIV_S AA
LQARILAVERYLKD

SEQ ID NO: 236 - DNA, 42 bp, Human immunodeficiency virus
  misc_feature: HIV_S DNA
ctccaggcaagaatcctagctgtagaaagatacctaaaagat

SEQ ID NO: 237 - DNA, 1584 bp, Artificial Sequence
  Synthetic
  misc_feature: HIV_S-8aHTM_IRES_GFP DNA
atggcactccccgtaactgctctgctgctgccgttggcattgctcctgcacgccgcacgcccgctccaggcaagaatcctagctgtagaaagatacctaaaagataccacgacgccagcgccgcgaccaccaacaccggcgcccaccatcgcgtcgcagcccctgtccctgcgcccagaggcgtgccggccagcggcggggggcgcagtgcacacgagggggctggacttcgcctgtgatatctacatctgggcgcccttggccgggacttgtggggtccttctcctgtcactggttatcaccctttactgcacgttactggccgaagccgcttggaataaggccggtgtgcgtttgtctatatgttattttccaccatattgccgtcttttggcaatgtgagggcccggaaacctggccctgtcttcttgacgagcattcctaggggtctttcccctctcgccaaaggaatgcaaggtctgttgaatgtcgtgaaggaagcagttcctctggaagcttcttgaagacaaacaacgtctgtagcgaccctttgcaggcagcggaaccccccacctggcgacaggtgcctctgcggccaaaagccacgtgtataagatacacctgcaaaggcggcacaaccccagtgccacgttgtgagttggatagttgtggaaagagtcaaatggctctcctcaagcgtattcaacaaggggctgaaggatgcccagaaggtaccccattgtatgggatctgatctggggcctcggtgcacatgctttacatgtgtttagtcgaggttaaaaaaacgtctaggccccccgaaccacggggacgtggttttcctttgaaaaacacgataataccatggtgagcaagggcgaggagctgttcaccggggtggtgcccatcctggtcgagctggacggcgacgtaaacggccacaagttcagcgtgtccggcgagggcgagggcgatgccacctacggcaagctgaccctgaagttcatctgcaccaccggcaagctgcccgtgccctggcccaccctcgtgaccaccctgacctacggcgtgcagtgcttcagccgctaccccgaccacatgaagcagcacgacttcttcaagtccgccatgcccgaaggctacgtccaggagcgcaccatcttcttcaaggacgacggcaactacaagacccgcgccgaggtgaagttcgagggcgacaccctggtgaaccgcatcgagctgaagggcatcgacttcaaggaggacggcaacatcctggggcacaagctggagtacaactacaacagccacaacgtctatatcatggccgacaagcagaagaacggcatcaaggtgaacttcaagatccgccacaacatcgaggacggcagcgtgcagctcgccgaccactaccagcagaacacccccatcggcgacggccccgtgctgctgcccgacaaccactacctgagcacccagtccgccctgagcaaagaccccaacgagaagcgcgatcacatggtcctgctggagttcgtgaccgccgccgggatcactctcggcatggacgagctgtacaagtaa

SEQ ID NO: 238 - protein, 104 aa, Artificial Sequence
  Synthetic
  MISC_FEATURE: HIV_S-8aHTM AA
MALPVTALLLPLALLLHAARPLQARILAVERYLKDTTTPAPRPPTPAPTIASQPLSLRPEACRPAAGGAVHTRGLDFACDIYIWAPLAGTCGVLLLSLVITLYC

SEQ ID NO: 239 - DNA, 312 bp, Artificial Sequence
  Synthetic
  misc_feature: HIV_S-8aHTM DNA
atggcactccccgtaactgctctgctgctgccgttggcattgctcctgcacgccgcacgcccgctccaggcaagaatcctagctgtagaaagatacctaaaagataccacgacgccagcgccgcgaccaccaacaccggcgcccaccatcgcgtcgcagcccctgtccctgcgcccagaggcgtgccggccagcggcggggggcgcagtgcacacgagggggctggacttcgcctgtgatatctacatctgggcgcccttggccgggacttgtggggtccttctcctgtcactggttatcaccctttactgc

SEQ ID NO: 240 - protein, 9 aa, Artificial Sequence
  Synthetic
  MISC_FEATURE: Single synthetic sequence for use in repeat - AA
AGFGLLLGF

SEQ ID NO: 241 - DNA, 27 bp, Artificial Sequence
  Synthetic
  misc_feature: Single synthetic for use in repeat - DNA
gccggcttcggcctgctgctgggcttc

SEQ ID NO: 242 - DNA, 1713 bp, Artificial Sequence
  Synthetic
  misc_feature: Synthetic 3x-8aHTM_IRES_GFP DNA
atggcactccccgtaactgctctgctgctgccgttggcattgctcctgcacgccgcacgcccggccggcttcggcctgctgctgggcttcggtggtggcggatccggtggtggcggttctggtggtggcggctccgccggcttcggcctgctgctgggcttcggtggtggcggatccggtggtggcggttctggtggtggcggctccgccggcttcggcctgctgctgggcttcaccacgacgccagcgccgcgaccaccaacaccggcgcccaccatcgcgtcgcagcccctgtccctgcgcccagaggcgtgccggccagcggcggggggcgcagtgcacacgagggggctggacttcgcctgtgatatctacatctgggcgcccttggccgggacttgtggggtccttctcctgtcactggttatcaccctttactgcacgttactggccgaagccgcttggaataaggccggtgtgcgtttgtctatatgttattttccaccatattgccgtcttttggcaatgtgagggcccggaaacctggccctgtcttcttgacgagcattcctaggggtctttcccctctcgccaaaggaatgcaaggtctgttgaatgtcgtgaaggaagcagttcctctggaagcttcttgaagacaaacaacgtctgtagcgaccctttgcaggcagcggaaccccccacctggcgacaggtgcctctgcggccaaaagccacgtgtataagatacacctgcaaaggcggcacaaccccagtgccacgttgtgagttggatagttgtggaaagagtcaaatggctctcctcaagcgtattcaacaaggggctgaaggatgcccagaaggtaccccattgtatgggatctgatctggggcctcggtgcacatgctttacatgtgtttagtcgaggttaaaaaaacgtctaggccccccgaaccacggggacgtggttttcctttgaaaaacacgataataccatggtgagcaagggcgaggagctgttcaccggggtggtgcccatcctggtcgagctggacggcgacgtaaacggccacaagttcagcgtgtccggcgagggcgagggcgatgccacctacggcaagctgaccctgaagttcatctgcaccaccggcaagctgcccgtgccctggcccaccctcgtgaccaccctgacctacggcgtgcagtgcttcagccgctaccccgaccacatgaagcagcacgacttcttcaagtccgccatgcccgaaggctacgtccaggagcgcaccatcttcttcaaggacgacggcaactacaagacccgcgccgaggtgaagttcgagggcgacaccctggtgaaccgcatcgagctgaagggcatcgacttcaaggaggacggcaacatcctggggcacaagctggagtacaactacaacagccacaacgtctatatcatggccgacaagcagaagaacggcatcaaggtgaacttcaagatccgccacaacatcgaggacggcagcgtgcagctcgccgaccactaccagcagaacacccccatcggcgacggccccgtgctgctgcccgacaaccactacctgagcacccagtccgccctgagcaaagaccccaacgagaagcgcgatcacatggtcctgctggagttcgtgaccgccgccgggatcactctcggcatggacgagctgtacaagtaa

SEQ ID NO: 243 - protein, 147 aa, Artificial Sequence
  Synthetic
  MISC_FEATURE: Synthetic 3x-8aHTM AA
MALPVTALLLPLALLLHAARPAGFGLLLGFGGGGSGGGGSGGGGSAGFGLLLGFGGGGSGGGGSGGGGSAGFGLLLGFTTTPAPRPPTPAPTIASQPLSLRPEACRPAAGGAVHTRGLDFACDIYIWAPLAGTCGVLLLSLVITLYC

SEQ ID NO: 244 - DNA, 441 bp, Artificial Sequence
  Synthetic
  misc_feature: Synthetic 3x-8aHTM DNA
atggcactccccgtaactgctctgctgctgccgttggcattgctcctgcacgccgcacgcccggccggcttcggcctgctgctgggcttcggtggtggcggatccggtggtggcggttctggtggtggcggctccgccggcttcggcctgctgctgggcttcggtggtggcggatccggtggtggcggttctggtggtggcggctccgccggcttcggcctgctgctgggcttcaccacgacgccagcgccgcgaccaccaacaccggcgcccaccatcgcgtcgcagcccctgtccctgcgcccagaggcgtgccggccagcggcggggggcgcagtgcacacgagggggctggacttcgcctgtgatatctacatctgggcgcccttggccgggacttgtggggtccttctcctgtcactggttatcaccctttactgc

SEQ ID NO: 245 - protein, 21 aa, Artificial Sequence
  Synthetic
  MISC_FEATURE: Truncated CD47 AA
GNYTCEVTELTREGETIIELK

SEQ ID NO: 246 - DNA, 63 bp, Artificial Sequence
  Synthetic
  misc_feature: Truncated CD47 DNA
ggaaactacacttgtgaagtaacagaattaaccagagaaggtgaaacgatcatcgagctaaaa

SEQ ID NO: 247 - DNA, 1605 bp, Artificial Sequence
  Synthetic
  misc_feature: tCD47-8aHTM_IRES_GFP DNA
atggcactccccgtaactgctctgctgctgccgttggcattgctcctgcacgccgcacgcccgggaaactacacttgtgaagtaacagaattaaccagagaaggtgaaacgatcatcgagctaaaaaccacgacgccagcgccgcgaccaccaacaccggcgcccaccatcgcgtcgcagcccctgtccctgcgcccagaggcgtgccggccagcggcggggggcgcagtgcacacgagggggctggacttcgcctgtgatatctacatctgggcgcccttggccgggacttgtggggtccttctcctgtcactggttatcaccctttactgcacgttactggccgaagccgcttggaataaggccggtgtgcgtttgtctatatgttattttccaccatattgccgtcttttggcaatgtgagggcccggaaacctggccctgtcttcttgacgagcattcctaggggtctttcccctctcgccaaaggaatgcaaggtctgttgaatgtcgtgaaggaagcagttcctctggaagcttcttgaagacaaacaacgtctgtagcgaccctttgcaggcagcggaaccccccacctggcgacaggtgcctctgcggccaaaagccacgtgtataagatacacctgcaaaggcggcacaaccccagtgccacgttgtgagttggatagttgtggaaagagtcaaatggctctcctcaagcgtattcaacaaggggctgaaggatgcccagaaggtaccccattgtatgggatctgatctggggcctcggtgcacatgctttacatgtgtttagtcgaggttaaaaaaacgtctaggccccccgaaccacggggacgtggttttcctttgaaaaacacgataataccatggtgagcaagggcgaggagctgttcaccggggtggtgcccatcctggtcgagctggacggcgacgtaaacggccacaagttcagcgtgtccggcgagggcgagggcgatgccacctacggcaagctgaccctgaagttcatctgcaccaccggcaagctgcccgtgccctggcccaccctcgtgaccaccctgacctacggcgtgcagtgcttcagccgctaccccgaccacatgaagcagcacgacttcttcaagtccgccatgcccgaaggctacgtccaggagcgcaccatcttcttcaaggacgacggcaactacaagacccgcgccgaggtgaagttcgagggcgacaccctggtgaaccgcatcgagctgaagggcatcgacttcaaggaggacggcaacatcctggggcacaagctggagtacaactacaacagccacaacgtctatatcatggccgacaagcagaagaacggcatcaaggtgaacttcaagatccgccacaacatcgaggacggcagcgtgcagctcgccgaccactaccagcagaacacccccatcggcgacggccccgtgctgctgcccgacaaccactacctgagcacccagtccgccctgagcaaagaccccaacgagaagcgcgatcacatggtcctgctggagttcgtgaccgccgccgggatcactctcggcatggacgagctgtacaagtaa

SEQ ID NO: 248 - protein, 111 aa, Artificial Sequence
  Synthetic
  MISC_FEATURE: tCD47-8aHTM AA
MALPVTALLLPLALLLHAARPGNYTCEVTELTREGETIIELKTTTPAPRPPTPAPTIASQPLSLRPEACRPAAGGAVHTRGLDFACDIYIWAPLAGTCGVLLLSLVITLYC

SEQ ID NO: 249 - DNA, 333 bp, Artificial Sequence
  Synthetic
  misc_feature: tCD47-8aHTM DNA
atggcactccccgtaactgctctgctgctgccgttggcattgctcctgcacgccgcacgcccgggaaactacacttgtgaagtaacagaattaaccagagaaggtgaaacgatcatcgagctaaaaaccacgacgccagcgccgcgaccaccaacaccggcgcccaccatcgcgtcgcagcccctgtccctgcgcccagaggcgtgccggccagcggcggggggcgcagtgcacacgagggggctggacttcgcctgtgatatctacatctgggcgcccttggccgggacttgtggggtccttctcctgtcactggttatcaccctttactgc

SEQ ID NO: 250 - protein, 28 aa, Viral consensus sequence
  MISC_FEATURE: single p15E for use in repeats - AA
LQNRRGLDLLFLKEGGLCAALKEECCFY

SEQ ID NO: 251 - DNA, 84 bp, Artificial Sequence; identical to SEQ ID NO: 221
  Synthetic
  misc_feature: single p15E sequence for use in repeats - DNA

SEQ ID NO: 252 - DNA, 1884 bp, Artificial Sequence
  Synthetic
  misc_feature: p15Ex3-8aHTM_IRES_GFP DNA
atggcactccccgtaactgctctgctgctgccgttggcattgctcctgcacgccgcacgcccgctgcaaaacagaaggggattagacctgctttttcttaaagagggagggctctgtgctgccttaaaggaagaatgttgcttttatggtggtggcggatccggtggtggcggttctggtggtggcggctccctgcaaaacagaaggggattagacctgctttttcttaaagagggagggctctgtgctgccttaaaggaagaatgttgcttttatggtggtggcggatccggtggtggcggttctggtggtggcggctccctgcaaaacagaaggggattagacctgctttttcttaaagagggagggctctgtgctgccttaaaggaagaatgttgcttttataccacgacgccagcgccgcgaccaccaacaccggcgcccaccatcgcgtcgcagcccctgtccctgcgcccagaggcgtgccggccagcggcggggggcgcagtgcacacgagggggctggacttcgcctgtgatatctacatctgggcgcccttggccgggacttgtggggtccttctcctgtcactggttatcaccctttactgcacgttactggccgaagccgcttggaataaggccggtgtgcgtttgtctatatgttattttccaccatattgccgtcttttggcaatgtgagggcccggaaacctggccctgtcttcttgacgagcattcctaggggtctttcccctctcgccaaaggaatgcaaggtctgttgaatgtcgtgaaggaagcagttcctctggaagcttcttgaagacaaacaacgtctgtagcgaccctttgcaggcagcggaaccccccacctggcgacaggtgcctctgcggccaaaagccacgtgtataagatacacctgcaaaggcggcacaaccccagtgccacgttgtgagttggatagttgtggaaagagtcaaatggctctcctcaagcgtattcaacaaggggctgaaggatgcccagaaggtaccccattgtatgggatctgatctggggcctcggtgcacatgctttacatgtgtttagtcgaggttaaaaaaacgtctaggccccccgaaccacggggacgtggttttcctttgaaaaacacgataataccatggtgagcaagggcgaggagctgttcaccggggtggtgcccatcctggtcgagctggacggcgacgtaaacggccacaagttcagcgtgtccggcgagggcgagggcgatgccacctacggcaagctgaccctgaagttcatctgcaccaccggcaagctgcccgtgccctggcccaccctcgtgaccaccctgacctacggcgtgcagtgcttcagccgctaccccgaccacatgaagcagcacgacttcttcaagtccgccatgcccgaaggctacgtccaggagcgcaccatcttcttcaaggacgacggcaactacaagacccgcgccgaggtgaagttcgagggcgacaccctggtgaaccgcatcgagctgaagggcatcgacttcaaggaggacggcaacatcctggggcacaagctggagtacaactacaacagccacaacgtctatatcatggccgacaagcagaagaacggcatcaaggtgaacttcaagatccgccacaacatcgaggacggcagcgtgcagctcgccgaccactaccagcagaacacccccatcggcgacggccccgtgctgctgcccgacaaccactacctgagcacccagtccgccctgagcaaagaccccaacgagaagcgcgatcacatggtcctgctggagttcgtgaccgccgccgggatcactctcggcatggacgagctgtacaagtaa

SEQ ID NO: 253 - protein, 204 aa, Artificial Sequence
  Synthetic
  MISC_FEATURE: p15Ex3-8aHTM AA
MALPVTALLLPLALLLHAARPLQNRRGLDLLFLKEGGLCAALKEECCFYGGGGSGGGGSGGGGSLQNRRGLDLLFLKEGGLCAALKEECCFYGGGGSGGGGSGGGGSLQNRRGLDLLFLKEGGLCAALKEECCFYTTTPAPRPPTPAPTIASQPLSLRPEACRPAAGGAVHTRGLDFACDIYIWAPLAGTCGVLLLSLVITLYC

SEQ ID NO: 254 - DNA, 612 bp, Artificial Sequence
  Synthetic
  misc_feature: p15Ex3-8aHTM DNA
atggcactccccgtaactgctctgctgctgccgttggcattgctcctgcacgccgcacgcccgctgcaaaacagaaggggattagacctgctttttcttaaagagggagggctctgtgctgccttaaaggaagaatgttgcttttatggtggtggcggatccggtggtggcggttctggtggtggcggctccctgcaaaacagaaggggattagacctgctttttcttaaagagggagggctctgtgctgccttaaaggaagaatgttgcttttatggtggtggcggatccggtggtggcggttctggtggtggcggctccctgcaaaacagaaggggattagacctgctttttcttaaagagggagggctctgtgctgccttaaaggaagaatgttgcttttataccacgacgccagcgccgcgaccaccaacaccggcgcccaccatcgcgtcgcagcccctgtccctgcgcccagaggcgtgccggccagcggcggggggcgcagtgcacacgagggggctggacttcgcctgtgatatctacatctgggcgcccttggccgggacttgtggggtccttctcctgtcactggttatcaccctttactgc

SEQ ID NO: 255 - DNA, 1734 bp, Artificial Sequence
  Synthetic
  misc_feature: p15E_tCD47-8aHTM_IRES_GFP DNA
atggcactccccgtaactgctctgctgctgccgttggcattgctcctgcacgccgcacgcccgctgcaaaacagaaggggattagacctgctttttcttaaagagggagggctctgtgctgccttaaaggaagaatgttgcttttatggtggtggcggatccggtggtggcggttctggtggtggcggctccggaaactacacttgtgaagtaacagaattaaccagagaaggtgaaacgatcatcgagctaaaaaccacgacgccagcgccgcgaccaccaacaccggcgcccaccatcgcgtcgcagcccctgtccctgcgcccagaggcgtgccggccagcggcggggggcgcagtgcacacgagggggctggacttcgcctgtgatatctacatctgggcgcccttggccgggacttgtggggtccttctcctgtcactggttatcaccctttactgcacgttactggccgaagccgcttggaataaggccggtgtgcgtttgtctatatgttattttccaccatattgccgtcttttggcaatgtgagggcccggaaacctggccctgtcttcttgacgagcattcctaggggtctttcccctctcgccaaaggaatgcaaggtctgttgaatgtcgtgaaggaagcagttcctctggaagcttcttgaagacaaacaacgtctgtagcgaccctttgcaggcagcggaaccccccacctggcgacaggtgcctctgcggccaaaagccacgtgtataagatacacctgcaaaggcggcacaaccccagtgccacgttgtgagttggatagttgtggaaagagtcaaatggctctcctcaagcgtattcaacaaggggctgaaggatgcccagaaggtaccccattgtatgggatctgatctggggcctcggtgcacatgctttacatgtgtttagtcgaggttaaaaaaacgtctaggccccccgaaccacggggacgtggttttcctttgaaaaacacgataataccatggtgagcaagggcgaggagctgttcaccggggtggtgcccatcctggtcgagctggacggcgacgtaaacggccacaagttcagcgtgtccggcgagggcgagggcgatgccacctacggcaagctgaccctgaagttcatctgcaccaccggcaagctgcccgtgccctggcccaccctcgtgaccaccctgacctacggcgtgcagtgcttcagccgctaccccgaccacatgaagcagcacgacttcttcaagtccgccatgcccgaaggctacgtccaggagcgcaccatcttcttcaaggacgacggcaactacaagacccgcgccgaggtgaagttcgagggcgacaccctggtgaaccgcatcgagctgaagggcatcgacttcaaggaggacggcaacatcctggggcacaagctggagtacaactacaacagccacaacgtctatatcatggccgacaagcagaagaacggcatcaaggtgaacttcaagatccgccacaacatcgaggacggcagcgtgcagctcgccgaccactaccagcagaacacccccatcggcgacggccccgtgctgctgcccgacaaccactacctgagcacccagtccgccctgagcaaagaccccaacgagaagcgcgatcacatggtcctgctggagttcgtgaccgccgccgggatcactctcggcatggacgagctgtacaagtaa

SEQ ID NO: 256 - protein, 154 aa, Artificial Sequence
  Synthetic
  MISC_FEATURE: p15E_tCD47-8aHTM AA
MALPVTALLLPLALLLHAARPLQNRRGLDLLFLKEGGLCAALKEECCFYGGGGSGGGGSGGGGSGNYTCEVTELTREGETIIELKTTTPAPRPPTPAPTIASQPLSLRPEACRPAAGGAVHTRGLDFACDIYIWAPLAGTCGVLLLSLVITLYC

SEQ ID NO: 257 - DNA, 462 bp, Artificial Sequence
  Synthetic
  misc_feature: p15E_tCD47-8aHTM DNA
atggcactccccgtaactgctctgctgctgccgttggcattgctcctgcacgccgcacgcccgctgcaaaacagaaggggattagacctgctttttcttaaagagggagggctctgtgctgccttaaaggaagaatgttgcttttatggtggtggcggatccggtggtggcggttctggtggtggcggctccggaaactacacttgtgaagtaacagaattaaccagagaaggtgaaacgatcatcgagctaaaaaccacgacgccagcgccgcgaccaccaacaccggcgcccaccatcgcgtcgcagcccctgtccctgcgcccagaggcgtgccggccagcggcggggggcgcagtgcacacgagggggctggacttcgcctgtgatatctacatctgggcgcccttggccgggacttgtggggtccttctcctgtcactggttatcaccctttactgc

SEQ ID NO: 258 - DNA, 1734 bp, Artificial Sequence
  Synthetic
  misc_feature: tCD47_p15E-8aHTM_IRES_GFP DNA
atggcactccccgtaactgctctgctgctgccgttggcattgctcctgcacgccgcacgcccgggaaactacacttgtgaagtaacagaattaaccagagaaggtgaaacgatcatcgagctaaaaggtggtggcggatccggtggtggcggttctggtggtggcggctccctgcaaaacagaaggggattagacctgctttttcttaaagagggagggctctgtgctgccttaaaggaagaatgttgcttttataccacgacgccagcgccgcgaccaccaacaccggcgcccaccatcgcgtcgcagcccctgtccctgcgcccagaggcgtgccggccagcggcggggggcgcagtgcacacgagggggctggacttcgcctgtgatatctacatctgggcgcccttggccgggacttgtggggtccttctcctgtcactggttatcaccctttactgcacgttactggccgaagccgcttggaataaggccggtgtgcgtttgtctatatgttattttccaccatattgccgtcttttggcaatgtgagggcccggaaacctggccctgtcttcttgacgagcattcctaggggtctttcccctctcgccaaaggaatgcaaggtctgttgaatgtcgtgaaggaagcagttcctctggaagcttcttgaagacaaacaacgtctgtagcgaccctttgcaggcagcggaaccccccacctggcgacaggtgcctctgcggccaaaagccacgtgtataagatacacctgcaaaggcggcacaaccccagtgccacgttgtgagttggatagttgtggaaagagtcaaatggctctcctcaagcgtattcaacaaggggctgaaggatgcccagaaggtaccccattgtatgggatctgatctggggcctcggtgcacatgctttacatgtgtttagtcgaggttaaaaaaacgtctaggccccccgaaccacggggacgtggttttcctttgaaaaacacgataataccatggtgagcaagggcgaggagctgttcaccggggtggtgcccatcctggtcgagctggacggcgacgtaaacggccacaagttcagcgtgtccggcgagggcgagggcgatgccacctacggcaagctgaccctgaagttcatctgcaccaccggcaagctgcccgtgccctggcccaccctcgtgaccaccctgacctacggcgtgcagtgcttcagccgctaccccgaccacatgaagcagcacgacttcttcaagtccgccatgcccgaaggctacgtccaggagcgcaccatcttcttcaaggacgacggcaactacaagacccgcgccgaggtgaagttcgagggcgacaccctggtgaaccgcatcgagctgaagggcatcgacttcaaggaggacggcaacatcctggggcacaagctggagtacaactacaacagccacaacgtctatatcatggccgacaagcagaagaacggcatcaaggtgaacttcaagatccgccacaacatcgaggacggcagcgtgcagctcgccgaccactaccagcagaacacccccatcggcgacggccccgtgctgctgcccgacaaccactacctgagcacccagtccgccctgagcaaagaccccaacgagaagcgcgatcacatggtcctgctggagttcgtgaccgccgccgggatcactctcggcatggacgagctgtacaagtaa

SEQ ID NO: 259 - protein, 154 aa, Artificial Sequence
  Synthetic
  MISC_FEATURE: tCD47_p15E-8aHTM AA
MALPVTALLLPLALLLHAARPGNYTCEVTELTREGETIIELKGGGGSGGGGSGGGGSLQNRRGLDLLFLKEGGLCAALKEECCFYTTTPAPRPPTPAPTIASQPLSLRPEACRPAAGGAVHTRGLDFACDIYIWAPLAGTCGVLLLSLVITLYC

SEQ ID NO: 260 - DNA, 462 bp, Artificial Sequence
  Synthetic
  misc_feature: tCD47_p15E-8aHTM DNA
atggcactccccgtaactgctctgctgctgccgttggcattgctcctgcacgccgcacgcccgggaaactacacttgtgaagtaacagaattaaccagagaaggtgaaacgatcatcgagctaaaaggtggtggcggatccggtggtggcggttctggtggtggcggctccctgcaaaacagaaggggattagacctgctttttcttaaagagggagggctctgtgctgccttaaaggaagaatgttgcttttataccacgacgccagcgccgcgaccaccaacaccggcgcccaccatcgcgtcgcagcccctgtccctgcgcccagaggcgtgccggccagcggcggggggcgcagtgcacacgagggggctggacttcgcctgtgatatctacatctgggcgcccttggccgggacttgtggggtccttctcctgtcactggttatcaccctttactgc

SEQ ID NO: 261 - DNA, 1875 bp, Artificial Sequence
  Synthetic
  misc_feature: HIV_L_tCD47-8aHTM_IRES_GFP DNA
atggcactccccgtaactgctctgctgctgccgttggcattgctcctgcacgccgcacgcccgggagctttrttccttgggttcttgggagcagcaggaagcactatgggcgcagcgtcagtgacgctgacggtacaggccagacaattaytgtctggtatagtgcarcagcagagcaatttgctgagagctattgaggcgcaacagcatatgttgcaactcacagtctggggcatyaaacagctccaggcaagagtcctggctgtggaaagatacctaaaggatcaaggtggtggcggatccggtggtggcggttctggtggtggcggctccggaaactacacttgtgaagtaacagaattaaccagagaaggtgaaacgatcatcgagctaaaaaccacgacgccagcgccgcgaccaccaacaccggcgcccaccatcgcgtcgcagcccctgtccctgcgcccagaggcgtgccggccagcggcggggggcgcagtgcacacgagggggctggacttcgcctgtgatatctacatctgggcgcccttggccgggacttgtggggtccttctcctgtcactggttatcaccctttactgcacgttactggccgaagccgcttggaataaggccggtgtgcgtttgtctatatgttattttccaccatattgccgtcttttggcaatgtgagggcccggaaacctggccctgtcttcttgacgagcattcctaggggtctttcccctctcgccaaaggaatgcaaggtctgttgaatgtcgtgaaggaagcagttcctctggaagcttcttgaagacaaacaacgtctgtagcgaccctttgcaggcagcggaaccccccacctggcgacaggtgcctctgcggccaaaagccacgtgtataagatacacctgcaaaggcggcacaaccccagtgccacgttgtgagttggatagttgtggaaagagtcaaatggctctcctcaagcgtattcaacaaggggctgaaggatgcccagaaggtaccccattgtatgggatctgatctggggcctcggtgcacatgctttacatgtgtttagtcgaggttaaaaaaacgtctaggccccccgaaccacggggacgtggttttcctttgaaaaacacgataataccatggtgagcaagggcgaggagctgttcaccggggtggtgcccatcctggtcgagctggacggcgacgtaaacggccacaagttcagcgtgtccggcgagggcgagggcgatgccacctacggcaagctgaccctgaagttcatctgcaccaccggcaagctgcccgtgccctggcccaccctcgtgaccaccctgacctacggcgtgcagtgcttcagccgctaccccgaccacatgaagcagcacgacttcttcaagtccgccatgcccgaaggctacgtccaggagcgcaccatcttcttcaaggacgacggcaactacaagacccgcgccgaggtgaagttcgagggcgacaccctggtgaaccgcatcgagctgaagggcatcgacttcaaggaggacggcaacatcctggggcacaagctggagtacaactacaacagccacaacgtctatatcatggccgacaagcagaagaacggcatcaaggtgaacttcaagatccgccacaacatcgaggacggcagcgtgcagctcgccgaccactaccagcagaacacccccatcggcgacggccccgtgctgctgcccgacaaccactacctgagcacccagtccgccctgagcaaagaccccaacgagaagcgcgatcacatggtcctgctggagttcgtgaccgccgccgggatcactctcggcatggacgagctgtacaagtaa

SEQ ID NO: 262 - protein, 201 aa, Artificial Sequence
  Synthetic
  MISC_FEATURE: HIV_L_tCD47-8aHTM AA
MALPVTALLLPLALLLHAARPGALFLGFLGAAGSTMGAASVTLTVQARQLLSGIVQQQSNLLRAIEAQQHMLQLTVWGIKQLQARVLAVERYLKDQGGGGSGGGGSGGGGSGNYTCEVTELTREGETIIELKTTTPAPRPPTPAPTIASQPLSLRPEACRPAAGGAVHTRGLDFACDIYIWAPLAGTCGVLLLSLVITLYC

SEQ ID NO: 263 - DNA, 603 bp, Artificial Sequence
  Synthetic
  misc_feature: HIV_L_tCD47-8aHTM DNA
atggcactccccgtaactgctctgctgctgccgttggcattgctcctgcacgccgcacgcccgggagctttrttccttgggttcttgggagcagcaggaagcactatgggcgcagcgtcagtgacgctgacggtacaggccagacaattaytgtctggtatagtgcarcagcagagcaatttgctgagagctattgaggcgcaacagcatatgttgcaactcacagtctggggcatyaaacagctccaggcaagagtcctggctgtggaaagatacctaaaggatcaaggtggtggcggatccggtggtggcggttctggtggtggcggctccggaaactacacttgtgaagtaacagaattaaccagagaaggtgaaacgatcatcgagctaaaaaccacgacgccagcgccgcgaccaccaacaccggcgcccaccatcgcgtcgcagcccctgtccctgcgcccagaggcgtgccggccagcggcggggggcgcagtgcacacgagggggctggacttcgcctgtgatatctacatctgggcgcccttggccgggacttgtggggtccttctcctgtcactggttatcaccctttactgc

SEQ ID NO: 264 - DNA, 1692 bp, Artificial Sequence
  Synthetic
  misc_feature: HIV_S_tCD47-8aHTM_IRES_GFP DNA
atggcactccccgtaactgctctgctgctgccgttggcattgctcctgcacgccgcacgcccgctccaggcaagaatcctagctgtagaaagatacctaaaagatggtggtggcggatccggtggtggcggttctggtggtggcggctccggaaactacacttgtgaagtaacagaattaaccagagaaggtgaaacgatcatcgagctaaaaaccacgacgccagcgccgcgaccaccaacaccggcgcccaccatcgcgtcgcagcccctgtccctgcgcccagaggcgtgccggccagcggcggggggcgcagtgcacacgagggggctggacttcgcctgtgatatctacatctgggcgcccttggccgggacttgtggggtccttctcctgtcactggttatcaccctttactgcacgttactggccgaagccgcttggaataaggccggtgtgcgtttgtctatatgttattttccaccatattgccgtcttttggcaatgtgagggcccggaaacctggccctgtcttcttgacgagcattcctaggggtctttcccctctcgccaaaggaatgcaaggtctgttgaatgtcgtgaaggaagcagttcctctggaagcttcttgaagacaaacaacgtctgtagcgaccctttgcaggcagcggaaccccccacctggcgacaggtgcctctgcggccaaaagccacgtgtataagatacacctgcaaaggcggcacaaccccagtgccacgttgtgagttggatagttgtggaaagagtcaaatggctctcctcaagcgtattcaacaaggggctgaaggatgcccagaaggtaccccattgtatgggatctgatctggggcctcggtgcacatgctttacatgtgtttagtcgaggttaaaaaaacgtctaggccccccgaaccacggggacgtggttttcctttgaaaaacacgataataccatggtgagcaagggcgaggagctgttcaccggggtggtgcccatcctggtcgagctggacggcgacgtaaacggccacaagttcagcgtgtccggcgagggcgagggcgatgccacctacggcaagctgaccctgaagttcatctgcaccaccggcaagctgcccgtgccctggcccaccctcgtgaccaccctgacctacggcgtgcagtgcttcagccgctaccccgaccacatgaagcagcacgacttcttcaagtccgccatgcccgaaggctacgtccaggagcgcaccatcttcttcaaggacgacggcaactacaagacccgcgccgaggtgaagttcgagggcgacaccctggtgaaccgcatcgagctgaagggcatcgacttcaaggaggacggcaacatcctggggcacaagctggagtacaactacaacagccacaacgtctatatcatggccgacaagcagaagaacggcatcaaggtgaacttcaagatccgccacaacatcgaggacggcagcgtgcagctcgccgaccactaccagcagaacacccccatcggcgacggccccgtgctgctgcccgacaaccactacctgagcacccagtccgccctgagcaaagaccccaacgagaagcgcgatcacatggtcctgctggagttcgtgaccgccgccgggatcactctcggcatggacgagctgtacaagtaa

SEQ ID NO: 265 - protein, 140 aa, Artificial Sequence
  Synthetic
  MISC_FEATURE: HIV_S_tCD47-8aHTM AA
MALPVTALLLPLALLLHAARPLQARILAVERYLKDGGGGSGGGGSGGGGSGNYTCEVTELTREGETIIELKTTTPAPRPPTPAPTIASQPLSLRPEACRPAAGGAVHTRGLDFACDIYIWAPLAGTCGVLLLSLVITLYC

SEQ ID NO: 266 - DNA, 420 bp, Artificial Sequence
  Synthetic
  misc_feature: HIV_S_tCD47-8aHTM DNA
atggcactccccgtaactgctctgctgctgccgttggcattgctcctgcacgccgcacgcccgctccaggcaagaatcctagctgtagaaagatacctaaaagatggtggtggcggatccggtggtggcggttctggtggtggcggctccggaaactacacttgtgaagtaacagaattaaccagagaaggtgaaacgatcatcgagctaaaaaccacgacgccagcgccgcgaccaccaacaccggcgcccaccatcgcgtcgcagcccctgtccctgcgcccagaggcgtgccggccagcggcggggggcgcagtgcacacgagggggctggacttcgcctgtgatatctacatctgggcgcccttggccgggacttgtggggtccttctcctgtcactggttatcaccctttactgc

SEQ ID NO: 267 - DNA, 1734 bp, Artificial Sequence
  Synthetic
  misc_feature: HTLV_tCD47-8aHTM_IRES_GFP DNA
atggcactccccgtaactgctctgctgctgccgttggcattgctcctgcacgccgcacgcccggcccagaacagacgaggccttgatctcctattctgggagcaaggaggattatgcaaagcattacaagaacagtgccgttttccgggtggtggcggatccggtggtggcggttctggtggtggcggctccggaaactacacttgtgaagtaacagaattaaccagagaaggtgaaacgatcatcgagctaaaaaccacgacgccagcgccgcgaccaccaacaccggcgcccaccatcgcgtcgcagcccctgtccctgcgcccagaggcgtgccggccagcggcggggggcgcagtgcacacgagggggctggacttcgcctgtgatatctacatctgggcgcccttggccgggacttgtggggtccttctcctgtcactggttatcaccctttactgcacgttactggccgaagccgcttggaataaggccggtgtgcgtttgtctatatgttattttccaccatattgccgtcttttggcaatgtgagggcccggaaacctggccctgtcttcttgacgagcattcctaggggtctttcccctctcgccaaaggaatgcaaggtctgttgaatgtcgtgaaggaagcagttcctctggaagcttcttgaagacaaacaacgtctgtagcgaccctttgcaggcagcggaaccccccacctggcgacaggtgcctctgcggccaaaagccacgtgtataagatacacctgcaaaggcggcacaaccccagtgccacgttgtgagttggatagttgtggaaagagtcaaatggctctcctcaagcgtattcaacaaggggctgaaggatgcccagaaggtaccccattgtatgggatctgatctggggcctcggtgcacatgctttacatgtgtttagtcgaggttaaaaaaacgtctaggccccccgaaccacggggacgtggttttcctttgaaaaacacgataataccatggtgagcaagggcgaggagctgttcaccggggtggtgcccatcctggtcgagctggacggcgacgtaaacggccacaagttcagcgtgtccggcgagggcgagggcgatgccacctacggcaagctgaccctgaagttcatctgcaccaccggcaagctgcccgtgccctggcccaccctcgtgaccaccctgacctacggcgtgcagtgcttcagccgctaccccgaccacatgaagcagcacgacttcttcaagtccgccatgcccgaaggctacgtccaggagcgcaccatcttcttcaaggacgacggcaactacaagacccgcgccgaggtgaagttcgagggcgacaccctggtgaaccgcatcgagctgaagggcatcgacttcaaggaggacggcaacatcctggggcacaagctggagtacaactacaacagccacaacgtctatatcatggccgacaagcagaagaacggcatcaaggtgaacttcaagatccgccacaacatcgaggacggcagcgtgcagctcgccgaccactaccagcagaacacccccatcggcgacggccccgtgctgctgcccgacaaccactacctgagcacccagtccgccctgagcaaagaccccaacgagaagcgcgatcacatggtcctgctggagttcgtgaccgccgccgggatcactctcggcatggacgagctgtacaagtaa

SEQ ID NO: 268 - protein, 154 aa, Artificial Sequence
  Synthetic
  MISC_FEATURE: HTLV_tCD47-8aHTM AA
MALPVTALLLPLALLLHAARPAQNRRGLDLLFWEQGGLCKALQEQCRFPGGGGSGGGGSGGGGSGNYTCEVTELTREGETIIELKTTTPAPRPPTPAPTIASQPLSLRPEACRPAAGGAVHTRGLDFACDIYIWAPLAGTCGVLLLSLVITLYC

SEQ ID NO: 269 - DNA, 462 bp, Artificial Sequence
  Synthetic
  misc_feature: HTLV_tCD47-8aHTM DNA
atggcactccccgtaactgctctgctgctgccgttggcattgctcctgcacgccgcacgcccggcccagaacagacgaggccttgatctcctattctgggagcaaggaggattatgcaaagcattacaagaacagtgccgttttccgggtggtggcggatccggtggtggcggttctggtggtggcggctccggaaactacacttgtgaagtaacagaattaaccagagaaggtgaaacgatcatcgagctaaaaaccacgacgccagcgccgcgaccaccaacaccggcgcccaccatcgcgtcgcagcccctgtccctgcgcccagaggcgtgccggccagcggcggggggcgcagtgcacacgagggggctggacttcgcctgtgatatctacatctgggcgcccttggccgggacttgtggggtccttctcctgtcactggttatcaccctttactgc

SEQ ID NO: 270 - DNA, 1863 bp, Artificial Sequence
  Synthetic
  misc_feature: tCD47_p15Ex2-8aHTM_IRES_GFP DNA
atggcactccccgtaactgctctgctgctgccgttggcattgctcctgcacgccgcacgcccgggaaactacacttgtgaagtaacagaattaaccagagaaggtgaaacgatcatcgagctaaaaggtggtggcggatccggtggtggcggttctggtggtggcggctccctgcaaaacagaaggggattagacctgctttttcttaaagagggagggctctgtgctgccttaaaggaagaatgttgcttttatggtggtggcggatccggtggtggcggttctggtggtggcggctccctgcaaaacagaaggggattagacctgctttttcttaaagagggagggctctgtgctgccttaaaggaagaatgttgcttttataccacgacgccagcgccgcgaccaccaacaccggcgcccaccatcgcgtcgcagcccctgtccctgcgcccagaggcgtgccggccagcggcggggggcgcagtgcacacgagggggctggacttcgcctgtgatatctacatctgggcgcccttggccgggacttgtggggtccttctcctgtcactggttatcaccctttactgcacgttactggccgaagccgcttggaataaggccggtgtgcgtttgtctatatgttattttccaccatattgccgtcttttggcaatgtgagggcccggaaacctggccctgtcttcttgacgagcattcctaggggtctttcccctctcgccaaaggaatgcaaggtctgttgaatgtcgtgaaggaagcagttcctctggaagcttcttgaagacaaacaacgtctgtagcgaccctttgcaggcagcggaaccccccacctggcgacaggtgcctctgcggccaaaagccacgtgtataagatacacctgcaaaggcggcacaaccccagtgccacgttgtgagttggatagttgtggaaagagtcaaatggctctcctcaagcgtattcaacaaggggctgaaggatgcccagaaggtaccccattgtatgggatctgatctggggcctcggtgcacatgctttacatgtgtttagtcgaggttaaaaaaacgtctaggccccccgaaccacggggacgtggttttcctttgaaaaacacgataataccatggtgagcaagggcgaggagctgttcaccggggtggtgcccatcctggtcgagctggacggcgacgtaaacggccacaagttcagcgtgtccggcgagggcgagggcgatgccacctacggcaagctgaccctgaagttcatctgcaccaccggcaagctgcccgtgccctggcccaccctcgtgaccaccctgacctacggcgtgcagtgcttcagccgctaccccgaccacatgaagcagcacgacttcttcaagtccgccatgcccgaaggctacgtccaggagcgcaccatcttcttcaaggacgacggcaactacaagacccgcgccgaggtgaagttcgagggcgacaccctggtgaaccgcatcgagctgaagggcatcgacttcaaggaggacggcaacatcctggggcacaagctggagtacaactacaacagccacaacgtctatatcatggccgacaagcagaagaacggcatcaaggtgaacttcaagatccgccacaacatcgaggacggcagcgtgcagctcgccgaccactaccagcagaacacccccatcggcgacggccccgtgctgctgcccgacaaccactacctgagcacccagtccgccctgagcaaagaccccaacgagaagcgcgatcacatggtcctgctggagttcgtgaccgccgccgggatcactctcggcatggacgagctgtacaagtaa

SEQ ID NO: 271 - protein, 197 aa, Artificial Sequence
  Synthetic
  MISC_FEATURE: tCD47_p15Ex2-8aHTM AA
MALPVTALLLPLALLLHAARPGNYTCEVTELTREGETIIELKGGGGSGGGGSGGGGSLQNRRGLDLLFLKEGGLCAALKEECCFYGGGGSGGGGSGGGGSLQNRRGLDLLFLKEGGLCAALKEECCFYTTTPAPRPPTPAPTIASQPLSLRPEACRPAAGGAVHTRGLDFACDIYIWAPLAGTCGVLLLSLVITLYC

SEQ ID NO: 272 - DNA, 591 bp, Artificial Sequence
  Synthetic
  misc_feature: tCD47_p15Ex2-8aHTM DNA
atggcactccccgtaactgctctgctgctgccgttggcattgctcctgcacgccgcacgcccgggaaactacacttgtgaagtaacagaattaaccagagaaggtgaaacgatcatcgagctaaaaggtggtggcggatccggtggtggcggttctggtggtggcggctccctgcaaaacagaaggggattagacctgctttttcttaaagagggagggctctgtgctgccttaaaggaagaatgttgcttttatggtggtggcggatccggtggtggcggttctggtggtggcggctccctgcaaaacagaaggggattagacctgctttttcttaaagagggagggctctgtgctgccttaaaggaagaatgttgcttttataccacgacgccagcgccgcgaccaccaacaccggcgcccaccatcgcgtcgcagcccctgtccctgcgcccagaggcgtgccggccagcggcggggggcgcagtgcacacgagggggctggacttcgcctgtgatatctacatctgggcgcccttggccgggacttgtggggtccttctcctgtcactggttatcaccctttactgc

SEQ ID NO: 273 - protein, 335 aa, Artificial Sequence
  Synthetic
  MISC_FEATURE: HLA-E AA
HSLKYFHTSVSRPGRGEPRFISVGYVDDTQFVRFDNDAASPRMVPRAPWMEQEGSEYWDRETRSARDTAQIFRVNLRTLRGYYNQSEAGSHTLQWMHGCELGPDRRFLRGYEQFAYDGKDYLTLNEDLRSWTAVDTAAQISEQKSNDASEAEHQRAYLEDTCVEWLHKYLEKGKETLLHLEPPKTHVTHHPISDHEATLRCWALGFYPAEITLTWQQDGEGHTQDTELVETRPAGDGTFQKWAAVVVPSGEEQRYTCHVQHEGLPEPVTLRWKPASQPTIPIVGIIAGLVLLGSVVSGAVVAAVIWRKKSSGGKGGSYYKAEWSDSAQGSESHSL

SEQ ID NO: 274 - DNA, 1008 bp, Artificial Sequence
  Synthetic
  misc_feature: HLA-E DNA
cactccttgaagtatttccacacttccgtgtcccggcccggccgcggggagccccgcttcatctctgtgggctacgtggacgacacccagttcgtgcgcttcgacaacgacgccgcgagtccgaggatggtgccgcgggcgccgtggatggagcaggaggggtcagagtattgggaccgggagacacggagcgccagggacaccgcacagattttccgagtgaacctgcggacgctgcgcggctactacaatcagagcgaggccgggtctcacaccctgcagtggatgcatggctgcgagctggggcccgacaggcgcttcctccgcgggtatgaacagttcgcctacgacggcaaggattatctcaccctgaatgaggacctgcgctcctggaccgcggtggacacggcggctcagatctccgagcaaaagtcaaatgatgcctctgaggcggagcaccagagagcctacctggaagacacatgcgtggagtggctccacaaatacctggagaaggggaaggagacgctgcttcacctggagcccccaaagacacacgtgactcaccaccccatctctgaccatgaggccaccctgaggtgctgggctctgggcttctaccctgcggagatcacactgacctggcagcaggatggggagggccatacccaggacacggagctcgtggagaccaggcctgcaggggatggaaccttccagaagtgggcagctgtggtggtgccttctggagaggagcagagatacacgtgccatgtgcagcatgaggggctacccgagcccgtcaccctgagatggaagccggcttcccagcccaccatccccatcgtgggcatcattgctggcctggttctccttggatctgtggtctctggagctgtggttgctgctgtgatatggaggaagaagagctcaggtggaaaaggagggagctactataaggctgagtggagcgacagtgcccaggggtctgagtctcacagcttgtaa

SEQ ID NO: 275 - DNA, 2835 bp, Artificial Sequence
  Synthetic
  misc_feature: HLA-E trimer_SS VMAPRTLFL_IRES_GFP DNA
atggcactccccgtaactgctctgctgctgccgttggcattgctcctgcacgccgcacgcccgtctcgctccgtggccttagctgtgctcgcgctactctctcttagcggcctcgaagctgttatggctccgcggactttattcttaggtggtggcggatccggtggtggcggttctggtggtggcggctccatccagcgtacgcccaaaattcaagtctacagccgacatcctgcagagaacggcaaatctaatttcctgaactgctatgtatcaggctttcaccctagcgatatagaagtggacctgctgaaaaacggagagaggatagaaaaggtcgaacacagcgacctctccttttccaaggactggagcttttatcttctgtattatactgaatttacacccacggaaaaagatgagtatgcgtgccgagtaaaccacgtcacgctgtcacagcccaaaatagtaaaatgggatcgcgacatgggtggtggcggttctggtggtggcggtagtggcggcggaggaagcggtggtggcggttccggatctcactccttgaagtatttccacacttccgtgtcccggcccggccgcggggagccccgcttcatctctgtgggctacgtggacgacacccagttcgtgcgcttcgacaacgacgccgcgagtccgaggatggtgccgcgggcgccgtggatggagcaggaggggtcagagtattgggaccgggagacacggagcgccagggacaccgcacagattttccgagtgaacctgcggacgctgcgcggctactacaatcagagcgaggccgggtctcacaccctgcagtggatgcatggctgcgagctggggcccgacaggcgcttcctccgcgggtatgaacagttcgcctacgacggcaaggattatctcaccctgaatgaggacctgcgctcctggaccgcggtggacacggcggctcagatctccgagcaaaagtcaaatgatgcctctgaggcggagcaccagagagcctacctggaagacacatgcgtggagtggctccacaaatacctggagaaggggaaggagacgctgcttcacctggagcccccaaagacacacgtgactcaccaccccatctctgaccatgaggccaccctgaggtgctgggctctgggcttctaccctgcggagatcacactgacctggcagcaggatggggagggccatacccaggacacggagctcgtggagaccaggcctgcaggggatggaaccttccagaagtgggcagctgtggtggtgccttctggagaggagcagagatacacgtgccatgtgcagcatgaggggctacccgagcccgtcaccctgagatggaagccggcttcccagcccaccatccccatcgtgggcatcattgctggcctggttctccttggatctgtggtctctggagctgtggttgctgctgtgatatggaggaagaagagctcaggtggaaaaggagggagctactataaggctgagtggagcgacagtgcccaggggtctgagtctcacagcttgtaaacgttactggccgaagccgcttggaataaggccggtgtgcgtttgtctatatgttattttccaccatattgccgtcttttggcaatgtgagggcccggaaacctggccctgtcttcttgacgagcattcctaggggtctttcccctctcgccaaaggaatgcaaggtctgttgaatgtcgtgaaggaagcagttcctctggaagcttcttgaagacaaacaacgtctgtagcgaccctttgcaggcagcggaaccccccacctggcgacaggtgcctctgcggccaaaagccacgtgtataagatacacctgcaaaggcggcacaaccccagtgccacgttgtgagttggatagttgtggaaagagtcaaatggctctcctcaagcgtattcaacaaggggctgaaggatgcccagaaggtaccccattgtatgggatctgatctggggcctcggtgcacatgctttacatgtgtttagtcgaggttaaaaaaacgtctaggccccccgaaccacggggacgtggttttcctttgaaaaacacgataataccatggtgagcaagggcgaggagctgttcaccggggtggtgcccatcctggtcgagctggacggcgacgtaaacggccacaagttcagcgtgtccggcgagggcgagggcgatgccacctacggcaagctgaccctgaagttcatctgcaccaccggcaagctgcccgtgccctggcccaccctcgtgaccaccctgacctacggcgtgcagtgcttcagccgctaccccgaccacatgaagcagcacgacttcttcaagtccgccatgcccgaaggctacgtccaggagcgcaccatcttcttcaaggacgacggcaactacaagacccgcgccgaggtgaagttcgagggcgacaccctggtgaaccgcatcgagctgaagggcatcgacttcaaggaggacggcaacatcctggggcacaagctggagtacaactacaacagccacaacgtctatatcatggccgacaagcagaagaacggcatcaaggtgaacttcaagatccgccacaacatcgaggacggcagcgtgcagctcgccgaccactaccagcagaacacccccatcggcgacggccccgtgctgctgcccgacaaccactacctgagcacccagtccgccctgagcaaagaccccaacgagaagcgcgatcacatggtcctgctggagttcgtgaccgccgccgggatcactctcggcatggacgagctgtacaagtaa

SEQ ID NO: 276 - protein, 520 aa, Artificial Sequence
  Synthetic
  MISC_FEATURE: HLA-E trimer_SS VMAPRTLFL AA
MALPVTALLLPLALLLHAARPSRSVALAVLALLSLSGLEAVMAPRTLFLGGGGSGGGGSGGGGSIQRTPKIQVYSRHPAENGKSNFLNCYVSGFHPSDIEVDLLKNGERIEKVEHSDLSFSKDWSFYLLYYTEFTPTEKDEYACRVNHVTLSQPKIVKWDRDMGGGGSGGGGSGGGGSGGGGSGSHSLKYFHTSVSRPGRGEPRFISVGYVDDTQFVRFDNDAASPRMVPRAPWMEQEGSEYWDRETRSARDTAQIFRVNLRTLRGYYNQSEAGSHTLQWMHGCELGPDRRFLRGYEQFAYDGKDYLTLNEDLRSWTAVDTAAQISEQKSNDASEAEHQRAYLEDTCVEWLHKYLEKGKETLLHLEPPKTHVTHHPISDHEATLRCWALGFYPAEITLTWQQDGEGHTQDTELVETRPAGDGTFQKWAAVVVPSGEEQRYTCHVQHEGLPEPVTLRWKPASQPTIPIVGIIAGLVLLGSVVSGAVVAAVIWRKKSSGGKGGSYYKAEWSDSAQGSESHSL

SEQ ID NO: 277 - DNA, 1563 bp, Artificial Sequence
  Synthetic
  misc_feature: HLA-E trimer_SS VMAPRTLFL DNA
atggcactccccgtaactgctctgctgctgccgttggcattgctcctgcacgccgcacgcccgtctcgctccgtggccttagctgtgctcgcgctactctctcttagcggcctcgaagctgttatggctccgcggactttattcttaggtggtggcggatccggtggtggcggttctggtggtggcggctccatccagcgtacgcccaaaattcaagtctacagccgacatcctgcagagaacggcaaatctaatttcctgaactgctatgtatcaggctttcaccctagcgatatagaagtggacctgctgaaaaacggagagaggatagaaaaggtcgaacacagcgacctctccttttccaaggactggagcttttatcttctgtattatactgaatttacacccacggaaaaagatgagtatgcgtgccgagtaaaccacgtcacgctgtcacagcccaaaatagtaaaatgggatcgcgacatgggtggtggcggttctggtggtggcggtagtggcggcggaggaagcggtggtggcggttccggatctcactccttgaagtatttccacacttccgtgtcccggcccggccgcggggagccccgcttcatctctgtgggctacgtggacgacacccagttcgtgcgcttcgacaacgacgccgcgagtccgaggatggtgccgcgggcgccgtggatggagcaggaggggtcagagtattgggaccgggagacacggagcgccagggacaccgcacagattttccgagtgaacctgcggacgctgcgcggctactacaatcagagcgaggccgggtctcacaccctgcagtggatgcatggctgcgagctggggcccgacaggcgcttcctccgcgggtatgaacagttcgcctacgacggcaaggattatctcaccctgaatgaggacctgcgctcctggaccgcggtggacacggcggctcagatctccgagcaaaagtcaaatgatgcctctgaggcggagcaccagagagcctacctggaagacacatgcgtggagtggctccacaaatacctggagaaggggaaggagacgctgcttcacctggagcccccaaagacacacgtgactcaccaccccatctctgaccatgaggccaccctgaggtgctgggctctgggcttctaccctgcggagatcacactgacctggcagcaggatggggagggccatacccaggacacggagctcgtggagaccaggcctgcaggggatggaaccttccagaagtgggcagctgtggtggtgccttctggagaggagcagagatacacgtgccatgtgcagcatgaggggctacccgagcccgtcaccctgagatggaagccggcttcccagcccaccatccccatcgtgggcatcattgctggcctggttctccttggatctgtggtctctggagctgtggttgctgctgtgatatggaggaagaagagctcaggtggaaaaggagggagctactataaggctgagtggagcgacagtgcccaggggtctgagtctcacagcttgtaa

SEQ ID NO: 278 - protein, 327 aa, Artificial Sequence
  Synthetic
  MISC_FEATURE: HLA-G P17693 no leader
LLSGALTLTETWAGSHSMRYFSAAVSRPGRGEPRFIAMGYVDDTQFVRFDSDSACPRMEPRAPWVEQEGPEYWEEETRNTKAHAQTDRMNLQTLRGYYNQSEASSHTLQWMIGCDLGSDGRLLRGYEQYAYDGKDYLALNEDLRSWTAADTAAQISKRKCEAANVAEQRRAYLEGTCVEWLHRYLENGKEMLQRADPPKTHVTHHPVFDYEATLRCWALGFYPAEIILTWQRDGEDQTQDVELVETRPAGDGTFQKWAAVVVPSGEEQRYTCHVQHEGLPEPLMLRWKQSSLPTIPIMGIVAGLVVLAAVVTGAAVAAVLWRKKSSD

SEQ ID NO: 279 - protein, 512 aa, Artificial Sequence
  Synthetic
  MISC_FEATURE: HLA-G AA
MALPVTALLLPLALLLHAARPSRSVALAVLALLSLSGLEAVMAPRTLFLGGGGSGGGGSGGGGSIQRTPKIQVYSRHPAENGKSNFLNCYVSGFHPSDIEVDLLKNGERIEKVEHSDLSFSKDWSFYLLYYTEFTPTEKDEYACRVNHVTLSQPKIVKWDRDMGGGGSGGGGSGGGGSGGGGSGSLLSGALTLTETWAGSHSMRYFSAAVSRPGRGEPRFIAMGYVDDTQFVRFDSDSACPRMEPRAPWVEQEGPEYWEEETRNTKAHAQTDRMNLQTLRGYYNQSEASSHTLQWMIGCDLGSDGRLLRGYEQYAYDGKDYLALNEDLRSWTAADTAAQISKRKCEAANVAEQRRAYLEGTCVEWLHRYLENGKEMLQRADPPKTHVTHHPVFDYEATLRCWALGFYPAEIILTWQRDGEDQTQDVELVETRPAGDGTFQKWAAVVVPSGEEQRYTCHVQHEGLPEPLMLRWKQSSLPTIPIMGIVAGLVVLAAVVTGAAVAAVLWRKKSSD

SEQ ID NO: 280 - protein, 349 aa, Artificial Sequence
  Synthetic
  MISC_FEATURE: UL18 AA
MHVLRYGYTGIFDDTSHMTLTVVGIFDGQHFFTYHVNSSDKASSRANGTISWMANVSAAYPTYLDGERAKGDLIFNQTEQNLLELEIALGYRSQSVLTWTHECNTTENGSFVAGYEGFGWDGETLMELKDNLTLWTGPNYEISWLKQNKTYIDGKIKNISEGDTTIQRNYLKGNCTQWSVIYSGFQTPVTHPVVKGGVRNQNDNRAEAFCTSYGFFPGEINITFIHYGNKAPDDSEPQCNPLLPTFDGTFHQGCYVAIFCNQNYTCRVTHGNWTVEIPISVTSPDDSSSGEVPDHPTANKRYNTMTISSVLLALLLCALLFAFLHYFTTLKQYLRNLAFAWRYRKVRSS

SEQ ID NO: 281 - DNA, 1050 bp, Human cytomegalovirus
  misc_feature: UL18 DNA
atgcacgtgctgagatacggatataccggcatcttcgacgatacatcccatatgactctgaccgtggtcgggatttttgacggacagcacttctttacataccatgtgaacagctccgataaggcttctagtcgagcaaatggcaccatctcatggatggccaacgtgagcgcagcctaccccacatatctggacggagaacgcgctaaaggcgatctgatcttcaatcagaccgagcagaacctgctggagctggaaattgctctggggtacaggtctcagagtgtcctgacatggactcacgaatgtaataccacagagaacgggagcttcgtggcaggatatgagggctttgggtgggacggagaaacactgatggagctgaaggataatctgactctgtggaccggccctaactacgaaatcagctggctgaagcagaacaagacttacatcgacggaaagatcaaaaacatcagcgagggcgatactaccatccagcgcaattacctgaagggcaactgcacccagtggagcgtgatctactctgggttccagacacctgtcactcacccagtggtcaaagggggagtgcgaaaccagaatgacaaccgggccgaggccttctgtacatcctacggcttctttcccggggagatcaatattacttttatccattacggcaacaaggcccccgacgattctgagcctcagtgcaatcccctgctgcctaccttcgatggcacatttcaccaggggtgctacgtcgctatcttctgcaatcagaactatacttgccgggtgacccatgggaactggactgtggaaatcccaatttcagtcaccagccccgacgattcaagctccggagaggtgccagatcaccccaccgcaaataagagatacaacaccatgacaatctctagtgtgctgctggccctgctgctgtgcgcactgctgttcgcttttctgcattacttcacaactctgaagcagtatctgcggaacctggcatttgcctggcggtacagaaaagtgagatcaagctga

SEQ ID NO: 282 - DNA, 2877 bp, Artificial Sequence
  Synthetic
  misc_feature: UL18 trimer_SS VMAPRTLFL_IRES_GFP DNA
atggcactccccgtaactgctctgctgctgccgttggcattgctcctgcacgccgcacgcccgtctcgctccgtggccttagctgtgctcgcgctactctctcttagcggcctcgaagctgttatggctccgcggactttattcttaggtggtggcggatccggtggtggcggttctggtggtggcggctccatccagcgtacgcccaaaattcaagtctacagccgacatcctgcagagaacggcaaatctaatttcctgaactgctatgtatcaggctttcaccctagcgatatagaagtggacctgctgaaaaacggagagaggatagaaaaggtcgaacacagcgacctctccttttccaaggactggagcttttatcttctgtattatactgaatttacacccacggaaaaagatgagtatgcgtgccgagtaaaccacgtcacgctgtcacagcccaaaatagtaaaatgggatcgcgacatgggtggtggcggttctggtggtggcggtagtggcggcggaggaagcggtggtggcggttccggatctatgcacgtgctgagatacggatataccggcatcttcgacgatacatcccatatgactctgaccgtggtcgggatttttgacggacagcacttctttacataccatgtgaacagctccgataaggcttctagtcgagcaaatggcaccatctcatggatggccaacgtgagcgcagcctaccccacatatctggacggagaacgcgctaaaggcgatctgatcttcaatcagaccgagcagaacctgctggagctggaaattgctctggggtacaggtctcagagtgtcctgacatggactcacgaatgtaataccacagagaacgggagcttcgtggcaggatatgagggctttgggtgggacggagaaacactgatggagctgaaggataatctgactctgtggaccggccctaactacgaaatcagctggctgaagcagaacaagacttacatcgacggaaagatcaaaaacatcagcgagggcgatactaccatccagcgcaattacctgaagggcaactgcacccagtggagcgtgatctactctgggttccagacacctgtcactcacccagtggtcaaagggggagtgcgaaaccagaatgacaaccgggccgaggccttctgtacatcctacggcttctttcccggggagatcaatattacttttatccattacggcaacaaggcccccgacgattctgagcctcagtgcaatcccctgctgcctaccttcgatggcacatttcaccaggggtgctacgtcgctatcttctgcaatcagaactatacttgccgggtgacccatgggaactggactgtggaaatcccaatttcagtcaccagccccgacgattcaagctccggagaggtgccagatcaccccaccgcaaataagagatacaacaccatgacaatctctagtgtgctgctggccctgctgctgtgcgcactgctgttcgcttttctgcattacttcacaactctgaagcagtatctgcggaacctggcatttgcctggcggtacagaaaagtgagatcaagctgaacgttactggccgaagccgcttggaataaggccggtgtgcgtttgtctatatgttattttccaccatattgccgtcttttggcaatgtgagggcccggaaacctggccctgtcttcttgacgagcattcctaggggtctttcccctctcgccaaaggaatgcaaggtctgttgaatgtcgtgaaggaagcagttcctctggaagcttcttgaagacaaacaacgtctgtagcgaccctttgcaggcagcggaaccccccacctggcgacaggtgcctctgcggccaaaagccacgtgtataagatacacctgcaaaggcggcacaaccccagtgccacgttgtgagttggatagttgtggaaagagtcaaatggctctcctcaagcgtattcaacaaggggctgaaggatgcccagaaggtaccccattgtatgggatctgatctggggcctcggtgcacatgctttacatgtgtttagtcgaggttaaaaaaacgtctaggccccccgaaccacggggacgtggttttcctttgaaaaacacgataataccatggtgagcaagggcgaggagctgttcaccggggtggtgcccatcctggtcgagctggacggcgacgtaaacggccacaagttcagcgtgtccggcgagggcgagggcgatgccacctacggcaagctgaccctgaagttcatctgcaccaccggcaagctgcccgtgccctggcccaccctcgtgaccaccctgacctacggcgtgcagtgcttcagccgctaccccgaccacatgaagcagcacgacttcttcaagtccgccatgcccgaaggctacgtccaggagcgcaccatcttcttcaaggacgacggcaactacaagacccgcgccgaggtgaagttcgagggcgacaccctggtgaaccgcatcgagctgaagggcatcgacttcaaggaggacggcaacatcctggggcacaagctggagtacaactacaacagccacaacgtctatatcatggccgacaagcagaagaacggcatcaaggtgaacttcaagatccgccacaacatcgaggacggcagcgtgcagctcgccgaccactaccagcagaacacccccatcggcgacggccccgtgctgctgcccgacaaccactacctgagcacccagtccgccctgagcaaagaccccaacgagaagcgcgatcacatggtcctgctggagttcgtgaccgccgccgggatcactctcggcatggacgagctgtacaagtaa

SEQ ID NO: 283 - protein, 534 aa, Artificial Sequence
  Synthetic
  MISC_FEATURE: UL18 trimer_SS VMAPRTLFL Amino acid
MALPVTALLLPLALLLHAARPSRSVALAVLALLSLSGLEAVMAPRTLFLGGGGSGGGGSGGGGSIQRTPKIQVYSRHPAENGKSNFLNCYVSGFHPSDIEVDLLKNGERIEKVEHSDLSFSKDWSFYLLYYTEFTPTEKDEYACRVNHVTLSQPKIVKWDRDMGGGGSGGGGSGGGGSGGGGSGSMHVLRYGYTGIFDDTSHMTLTVVGIFDGQHFFTYHVNSSDKASSRANGTISWMANVSAAYPTYLDGERAKGDLIFNQTEQNLLELEIALGYRSQSVLTWTHECNTTENGSFVAGYEGFGWDGETLMELKDNLTLWTGPNYEISWLKQNKTYIDGKIKNISEGDTTIQRNYLKGNCTQWSVIYSGFQTPVTHPVVKGGVRNQNDNRAEAFCTSYGFFPGEINITFIHYGNKAPDDSEPQCNPLLPTFDGTFHQGCYVAIFCNQNYTCRVTHGNWTVEIPISVTSPDDSSSGEVPDHPTANKRYNTMTISSVLLALLLCALLFAFLHYFTTLKQYLRNLAFAWRYRKVRSS

SEQ ID NO: 284 - DNA, 1605 bp, Artificial Sequence
  Synthetic
  misc_feature: UL18 trimer_SS VMAPRTLFL DNA
atggcactccccgtaactgctctgctgctgccgttggcattgctcctgcacgccgcacgcccgtctcgctccgtggccttagctgtgctcgcgctactctctcttagcggcctcgaagctgttatggctccgcggactttattcttaggtggtggcggatccggtggtggcggttctggtggtggcggctccatccagcgtacgcccaaaattcaagtctacagccgacatcctgcagagaacggcaaatctaatttcctgaactgctatgtatcaggctttcaccctagcgatatagaagtggacctgctgaaaaacggagagaggatagaaaaggtcgaacacagcgacctctccttttccaaggactggagcttttatcttctgtattatactgaatttacacccacggaaaaagatgagtatgcgtgccgagtaaaccacgtcacgctgtcacagcccaaaatagtaaaatgggatcgcgacatgggtggtggcggttctggtggtggcggtagtggcggcggaggaagcggtggtggcggttccggatctatgcacgtgctgagatacggatataccggcatcttcgacgatacatcccatatgactctgaccgtggtcgggatttttgacggacagcacttctttacataccatgtgaacagctccgataaggcttctagtcgagcaaatggcaccatctcatggatggccaacgtgagcgcagcctaccccacatatctggacggagaacgcgctaaaggcgatctgatcttcaatcagaccgagcagaacctgctggagctggaaattgctctggggtacaggtctcagagtgtcctgacatggactcacgaatgtaataccacagagaacgggagcttcgtggcaggatatgagggctttgggtgggacggagaaacactgatggagctgaaggataatctgactctgtggaccggccctaactacgaaatcagctggctgaagcagaacaagacttacatcgacggaaagatcaaaaacatcagcgagggcgatactaccatccagcgcaattacctgaagggcaactgcacccagtggagcgtgatctactctgggttccagacacctgtcactcacccagtggtcaaagggggagtgcgaaaccagaatgacaaccgggccgaggccttctgtacatcctacggcttctttcccggggagatcaatattacttttatccattacggcaacaaggcccccgacgattctgagcctcagtgcaatcccctgctgcctaccttcgatggcacatttcaccaggggtgctacgtcgctatcttctgcaatcagaactatacttgccgggtgacccatgggaactggactgtggaaatcccaatttcagtcaccagccccgacgattcaagctccggagaggtgccagatcaccccaccgcaaataagagatacaacaccatgacaatctctagtgtgctgctggccctgctgctgtgcgcactgctgttcgcttttctgcattacttcacaactctgaagcagtatctgcggaacctggcatttgcctggcggtacagaaaagtgagatcaagctga

SEQ ID NO: 285 - protein, 526 aa, Artificial Sequence [sequence omitted]

SEQ ID NO: 286 - protein, 123 aa, Artificial Sequence
  Synthetic
  MISC_FEATURE: CD47 ECD
QLLFNKTKSVEFTFCNDTVVIPCFVTNMEAQNTTEVYVKWKFKGRDIYTFDGALNKSTVPTDFSSAKIEVSQLLKGDASLKMDKSDAVSHTGNYTCEVTELTREGETIIELKYRVVSWFSPNE

SEQ ID NO: 287 - protein, 323 aa, Homo sapiens
  MISC_FEATURE: CD47
MWPLVAALLLGSACCGSAQLLFNKTKSVEFTFCNDTVVIPCFVTNMEAQNTTEVYVKWKFKGRDIYTFDGALNKSTVPTDFSSAKIEVSQLLKGDASLKMDKSDAVSHTGNYTCEVTELTREGETIIELKYRVVSWFSPNENILIVIFPIFAILLFWGQFGIKTLKYRSGGMDEKTIALLVAGLVITVIVIVGAILFVPGEYSLKNATGLGLIVTSTGILILLHYYVFSTAIGLTSFVIAILVIQVIAYILAVVGLSLCIAACIPMHGPLLISGLSILALAQLLGLVYMKFVASNQKTIQPPRKAVEEPLNAFKESKGMMNDE

SEQ ID NO: 288 - protein, 12 aa, Artificial Sequence
  Synthetic
  MISC_FEATURE: truncated CD47
CEVTELTREGEC

SEQ ID NO: 289 - protein, 10 aa, Artificial Sequence
  Synthetic
  MISC_FEATURE: CD47 self hairpin
EVTELTREGE

SEQ ID NO: 290 - DNA, 20 bp, Artificial Sequence
  Synthetic
  misc_feature: B2M guide RNA
cgcgagcacagctaaggcca

SEQ ID NO: 291 - DNA, 20 bp, Artificial Sequence
  Synthetic
  misc_feature: B2M guide RNA
gagtagcgcgagcacagcta

SEQ ID NO: 292 - DNA, 20 bp, Artificial Sequence
  Synthetic
  misc_feature: B2M guide RNA
gctactctctctttctggcc

SEQ ID NO: 293 - DNA, 20 bp, Artificial Sequence
  Synthetic
  misc_feature: B2M guide RNA
ggccgagatgtctcgctccg

SEQ ID NO: 294 - DNA, 20 bp, Artificial Sequence
  Synthetic
  misc_feature: B2M guide RNA
ggccacggagcgagacatct

SEQ ID NO: 295 - DNA, 20 bp, Artificial Sequence
  Synthetic
  misc_feature: B2M guide RNA
cacagcccaagatagttaag

SEQ ID NO: 296 - DNA, 20 bp, Artificial Sequence
  Synthetic
  misc_feature: B2M guide RNA
agtcacatggttcacacggc

SEQ ID NO: 297 - DNA, 20 bp, Artificial Sequence
  Synthetic
  misc_feature: B2M guide RNA
aagtcaacttcaatgtcgga

SEQ ID NO: 298 - DNA, 20 bp, Artificial Sequence
  Synthetic
  misc_feature: B2M guide RNA
acttgtctttcagcaaggac

SEQ ID NO: 299 - DNA, 20 bp, Artificial Sequence
  Synthetic
  misc_feature: B2M guide RNA
tgggctgtgacaaagtcaca

SEQ ID NO: 300 - DNA, 2169 bp, Artificial Sequence
  Synthetic
  misc_feature: NK77.1_CD70_DB01_C03
atggccttaccagtgaccgccttgctcctgccgctggccttgctgctccacgccgccaggccggactacaaagacgatgacgataaaggcggtggtggctctggtggtggcggatcccaggtgcagctggtgcagtctggggctgaggtgaagaagcctggggcctcagtgaaggtctcctgcaaggcttctggatacaccttcaccggccattatttgcactgggtgcgacaggcccctggacaagggcttgagtggatgggatggatcaaccctaacagtggtggcacaaactatgcacagaagtttcagggcagggtcaccatgaccagggacacgtccactagcacagtgtacatggagctgagcagcctgagatctgaggacacggccgtgtattactgtgttagaggaagcggttggtatgacctggactactggggccaagggaccctggtcaccgtctcctcaggtggaggcggttcaggcggaggtggctctggcggtggcggatcggacatccagatgacccagtctccatcctccctgtctgcatctgtaggagacagagtcaccatcacttgccgggcaagtcagaatattggcacatatttagcttggtatcagcagaaaccagggaaagcccctaagctcctgatctatgacgcatccaacttggagactggggtcccatcaaggttcagtggcagtggatctgggacagatttcactctcaccatcagcagtctgcaacctgaagattttgcaacttactactgtcaacagagttacagaatccctctcaccttcggccaagggacacgactggagattaaaaccacgacgccagcgccgcggccaccaacaccggcgcccaccatcgcgtcgcagcccctgtccctgcgcccagaggcgtgccggccagcggcggggggcgcagtgcacacgagggggctggacttcgcctgtgatatctacatctgggcgcccttggccgggacttgtggggtccttctcctgtcactggttatcaccctttactgccggagggaccagaggctgccccccgatgcccacaagccccctgggggaggcagtttccggacccccatccaagaggagcaggccgacgcccactccaccctggccaagatcagagtgaagttcagcaggagcgcagacgcccccgcgtaccagcagggccagaaccagctctataacgagctcaatctaggacgaagagaggagtacgatgttttggacaagagacgtggccgggaccctgagatggggggaaagccgagaaggaagaaccctcaggaaggcctgtacaatgaactgcagaaagataagatggcggaggcctacagtgagattgggatgaaaggcgagcgccggaggggcaaggggcacgatggcctttaccagggtctcagtacagccaccaaggacacctacgacgcccttcacatgcaggccctgccccctcgcggctctggcgagggaaggggttccctgcttacttgcggcgacgtcgaagagaatcccggtccgatggccctcccagtaactgccctccttttgcccctcgcactccttcttcatgccgctcgccccaactgggtcaacgtgattagcgatttgaagaaaatcgaggaccttatacagtctatgcatattgacgctacactgtatactgagagtgatgtacacccgtcctgtaaggtaacggccatgaaatgctttcttctggagctccaggtcatcagcttggagtctggggacgcaagcatccacgatacggttgaaaacctcatcatccttgcgaacaactctctctcatctaatggaaacgttacagagagtgggtgtaaggagtgcgaagagttggaagaaaaaaacatcaaagaatttcttcaatccttcgttcacatagtgcaaatgttcattaacacgtccactaccacacccgccccgaggccacctacgccggcaccgactatcgccagtcaacccctctctctgcgccccgaggcttgccggcctgcggctggtggggcggtccacacccggggcctggattttgcgtgcgatatatacatctgggcacctcttgccggcacctgcggagtgctgcttctctcactcgttattacgctgtactgctaa

SEQ ID NO: 301 - DNA, 2172 bp, Artificial Sequence
  Synthetic
  misc_feature: NK77.2_CD70_DB01_D02
atggccttaccagtgaccgccttgctcctgccgctggccttgctgctccacgccgccaggccggactacaaagacgatgacgataaaggcggtggtggctctggtggtggcggatcccaggtgcagctggtgcagtctggggctgaggtgaagaagcctggggcctcagtgaaggtttcctgcaaggcatctggatacaccttcaccaactactatatgcactgggtgcgacaggcccctggacaagggcttgagtggatgggaataatcaaccctagtggtgggagcacaagctacgcacagaagttccagggcagagtcaccatgaccagggacacgtccacgagcacagtctacatggagctgagcagcctgagatctgaggacacggccgtgtattactgtgctagagaactaggagtcgccgggtacttcgatctctggggccgtggcaccctggtcactgtctcctcaggtggaggcggttcaggcggaggtggctctggcggtggcggatcggacatccagatgacccagtctccatcctccctgtctgcatctgtaggagacagagtcaccatcacttgccgggcgagtcagaggattagcaattggttagcctggtatcagcagaaaccagggaaagcccctaagctcctgatctatgatgcatccaacttggaaaccggggtcccatccaggttcagtggcagtggatctgggacggattttactctcaccatcagcagcctgcagcctgaagattttgcaacttattactgtcaacagacctatagtcctccccctacttttggccaggggaccaagctggagatcaaaaccacgacgccagcgccgcggccaccaacaccggcgcccaccatcgcgtcgcagcccctgtccctgcgcccagaggcgtgccggccagcggcggggggcgcagtgcacacgagggggctggacttcgcctgtgatatctacatctgggcgcccttggccgggacttgtggggtccttctcctgtcactggttatcaccctttactgccggagggaccagaggctgccccccgatgcccacaagccccctgggggaggcagtttccggacccccatccaagaggagcaggccgacgcccactccaccctggccaagatcagagtgaagttcagcaggagcgcagacgcccccgcgtaccagcagggccagaaccagctctataacgagctcaatctaggacgaagagaggagtacgatgttttggacaagagacgtggccgggaccctgagatggggggaaagccgagaaggaagaaccctcaggaaggcctgtacaatgaactgcagaaagataagatggcggaggcctacagtgagattgggatgaaaggcgagcgccggaggggcaaggggcacgatggcctttaccagggtctcagtacagccaccaaggacacctacgacgcccttcacatgcaggccctgccccctcgcggctctggcgagggaaggggttccctgcttacttgcggcgacgtcgaagagaatcccggtccgatggccctcccagtaactgccctccttttgcccctcgcactccttcttcatgccgctcgccccaactgggtcaacgtgattagcgatttgaagaaaatcgaggaccttatacagtctatgcatattgacgctacactgtatactgagagtgatgtacacccgtcctgtaaggtaacggccatgaaatgctttcttctggagctccaggtcatcagcttggagtctggggacgcaagcatccacgatacggttgaaaacctcatcatccttgcgaacaactctctctcatctaatggaaacgttacagagagtgggtgtaaggagtgcgaagagttggaagaaaaaaacatcaaagaatttcttcaatccttcgttcacatagtgcaaatgttcattaacacgtccactaccacacccgccccgaggccacctacgccggcaccgactatcgccagtcaacccctctctctgcgccccgaggcttgccggcctgcggctggtggggcggtccacacccggggcctggattttgcgtgcgatatatacatctgggcacctcttgccggcacctgcggagtgctgcttctctcactcgttattacgctgtactgctaa

SEQ ID NO: 302 - DNA, 2199 bp, Artificial Sequence
  Synthetic
  misc_feature: NK77.3_CD70_DB01_E06
atggccttaccagtgaccgccttgctcctgccgctggccttgctgctccacgccgccaggccggactacaaagacgatgacgataaaggcggtggtggctctggtggtggcggatcccaggtgcagctggtgcagtctggggctgaggtgaagaagcctggggcctcagtgaaggtttcctgcaaggcatctggatacaccttcaccggttactatatccactgggtgcgacaggcccctggacaagggcttgagtggatgggaataatcaaccctagtggtggaagcacaagctacgcacagaagttccagggcagagtcaccatgaccagggacacgtccacgagcacagtctacatggagctgagcagcctgagatctgaggacacggccgtgtattactgtgctagagacctgtcagggatcgacggatatattggtttctttgactactggggccaagggaccctggtcaccgtctcctcaggtggaggcggttcaggcggaggtggctctggcggtggcggatcggatattgtgatgactcagtctccactctccctgcccgtcacccctggagagccggcctccatctcctgcaggtctagtcagagcctcctgcactctaacggatacaactatttggattggtacctgcagaagccagggcagtctccacagctcctgatctatgcagcctcttcattacaatccggggtccctgacaggttcagtggcagtggatcaggcacagattttacactgaaaatcagcagagtggaggctgaggatgttggggtttattactgcatgcaagctctacaaactcctatcaccttcggccaagggacacgactggagattaaaaccacgacgccagcgccgcggccaccaacaccggcgcccaccatcgcgtcgcagcccctgtccctgcgcccagaggcgtgccggccagcggcggggggcgcagtgcacacgagggggctggacttcgcctgtgatatctacatctgggcgcccttggccgggacttgtggggtccttctcctgtcactggttatcaccctttactgccggagggaccagaggctgccccccgatgcccacaagccccctgggggaggcagtttccggacccccatccaagaggagcaggccgacgcccactccaccctggccaagatcagagtgaagttcagcaggagcgcagacgcccccgcgtaccagcagggccagaaccagctctataacgagctcaatctaggacgaagagaggagtacgatgttttggacaagagacgtggccgggaccctgagatggggggaaagccgagaaggaagaaccctcaggaaggcctgtacaatgaactgcagaaagataagatggcggaggcctacagtgagattgggatgaaaggcgagcgccggaggggcaaggggcacgatggcctttaccagggtctcagtacagccaccaaggacacctacgacgcccttcacatgcaggccctgccccctcgcggctctggcgagggaaggggttccctgcttacttgcggcgacgtcgaagagaatcccggtccgatggccctcccagtaactgccctccttttgcccctcgcactccttcttcatgccgctcgccccaactgggtcaacgtgattagcgatttgaagaaaatcgaggaccttatacagtctatgcatattgacgctacactgtatactgagagtgatgtacacccgtcctgtaaggtaacggccatgaaatgctttcttctggagctccaggtcatcagcttggagtctggggacgcaagcatccacgatacggttgaaaacctcatcatccttgcgaacaactctctctcatctaatggaaacgttacagagagtgggtgtaaggagtgcgaagagttggaagaaaaaaacatcaaagaatttcttcaatccttcgttcacatagtgcaaatgttcattaacacgtccactaccacacccgccccgaggccacctacgccggcaccgactatcgccagtcaacccctctctctgcgccccgaggcttgccggcctgcggctggtggggcggtccacacccggggcctggattttgcgtgcgatatatacatctgggcacctcttgccggcacctgcggagtgctgcttctctcactcgttattacgctgtactgctaa

SEQ ID NO: 303 - DNA, 2172 bp, Artificial Sequence
  Synthetic
  misc_feature: NK77.4_CD70_DB01_G04
atggccttaccagtgaccgccttgctcctgccgctggccttgctgctccacgccgccaggccggactacaaagacgatgacgataaaggcggtggtggctctggtggtggcggatcccaggtgcagctggtgcagtctggggctgaggtgaagaagcctggggcctcagtgaaggtttcctgcaaggcatctggaggaaccttcagaagccatgtcatatcctgggtgcgacaggcccctggacaagggcttgagtggatgggaataatcgatcctagtggtggcagcacaagctacgcacagaggttccagggcagagtcaccatgaccagggacacgtccacgagcacagtctacatggagctgagcagcctgagatctgaggacacggccgtgtattactgtgctaaagattacactgggctgcttggaatggatgtctggggccaagggacaaccgtcaccgtctcttcaggtggaggcggttcaggcggaggtggctctggcggtggcggatcggacatccagatgacccagtctccatcctccctgtctgcatctgtaggagacagagtcaccatcacttgccgggcaagtcaggacattgacacctatttagcctggtatcagcagaaaccagggaaagcccctaagctcctgatctatgctgcatccagtttgcaaagtggggtcccatcaaggttcagtggcagtggatctgggacagatttcactctcaccatcagcagtctgcaacctgaagattttgcaacttactactgtcaacagagttacacaacccctttcacgttcggccaagggaccaaggtggaaatcaaaaccacgacgccagcgccgcggccaccaacaccggcgcccaccatcgcgtcgcagcccctgtccctgcgcccagaggcgtgccggccagcggcggggggcgcagtgcacacgagggggctggacttcgcctgtgatatctacatctgggcgcccttggccgggacttgtggggtccttctcctgtcactggttatcaccctttactgccggagggaccagaggctgccccccgatgcccacaagccccctgggggaggcagtttccggacccccatccaagaggagcaggccgacgcccactccaccctggccaagatcagagtgaagttcagcaggagcgcagacgcccccgcgtaccagcagggccagaaccagctctataacgagctcaatctaggacgaagagaggagtacgatgttttggacaagagacgtggccgggaccctgagatggggggaaagccgagaaggaagaaccctcaggaaggcctgtacaatgaactgcagaaagataagatggcggaggcctacagtgagattgggatgaaaggcgagcgccggaggggcaaggggcacgatggcctttaccagggtctcagtacagccaccaaggacacctacgacgcccttcacatgcaggccctgccccctcgcggctctggcgagggaaggggttccctgcttacttgcggcgacgtcgaagagaatcccggtccgatggccctcccagtaactgccctccttttgcccctcgcactccttcttcatgccgctcgccccaactgggtcaacgtgattagcgatttgaagaaaatcgaggaccttatacagtctatgcatattgacgctacactgtatactgagagtgatgtacacccgtcctgtaaggtaacggccatgaaatgctttcttctggagctccaggtcatcagcttggagtctggggacgcaagcatccacgatacggttgaaaacctcatcatccttgcgaacaactctctctcatctaatggaaacgttacagagagtgggtgtaaggagtgcgaagagttggaagaaaaaaacatcaaagaatttcttcaatccttcgttcacatagtgcaaatgttcattaacacgtccactaccacacccgccccgaggccacctacgccggcaccgactatcgccagtcaacccctctctctgcgccccgaggcttgccggcctgcggctggtggggcggtccacacccggggcctggattttgcgtgcgatatatacatctgggcacctcttgccggcacctgcggagtgctgcttctctcactcgttattacgctgtactgctaa

SEQ ID NO: 304 - DNA, 2172 bp, Artificial Sequence
  Synthetic
  misc_feature: NK77.5_CD70_DB01_G05
atggccttaccagtgaccgccttgctcctgccgctggccttgctgctccacgccgccaggccggactacaaagacgatgacgataaaggcggtggtggctctggtggtggcggatcccaggtgcagctggtgcagtctggggctgaggtgaagaagcctggggcctcagtgaaggtctcctgcaaggcttctggatacaccttcatcgactattatatccattgggtgcgacaggcccctggacaagggcttgagtggatgggatggatgaaccccaacagtggtaacacaggctatgcacagaagttccagggcagagtcaccatgaccagggacacctccacaagcacagtctacatggagctgagcagcctgagatctgaggacacggccgtgtattactgtgcgagaggcctttccggctacgacttggacgactactggggccaagggaccctggtcaccgtctcctcaggtggaggcggttcaggcggaggtggctctggcggtggcggatcggacatccagatgacccagtctccatcctccctgtctgcatctgtaggagacagagtcaccatcacttgccaggcaagtcaggacattagcaactatttaaattggtatcagcagaaaccagggaaagcccctaagctcctgatctatgatgcatccagtttggaaagtggggtcccatcaaggttcagtggcagtggatctgggacagatttcactctcaccatcagcagtctgcaacctgaagattttgcaacttactactgtcaacagagttaccgatcacctctcactttcggcggagggaccaaggtggagatcaaaaccacgacgccagcgccgcggccaccaacaccggcgcccaccatcgcgtcgcagcccctgtccctgcgcccagaggcgtgccggccagcggcggggggcgcagtgcacacgagggggctggacttcgcctgtgatatctacatctgggcgcccttggccgggacttgtggggtccttctcctgtcactggttatcaccctttactgccggagggaccagaggctgccccccgatgcccacaagccccctgggggaggcagtttccggacccccatccaagaggagcaggccgacgcccactccaccctggccaagatcagagtgaagttcagcaggagcgcagacgcccccgcgtaccagcagggccagaaccagctctataacgagctcaatctaggacgaagagaggagtacgatgttttggacaagagacgtggccgggaccctgagatggggggaaagccgagaaggaagaaccctcaggaaggcctgtacaatgaactgcagaaagataagatggcggaggcctacagtgagattgggatgaaaggcgagcgccggaggggcaaggggcacgatggcctttaccagggtctcagtacagccaccaaggacacctacgacgcccttcacatgcaggccctgccccctcgcggctctggcgagggaaggggttccctgcttacttgcggcgacgtcgaagagaatcccggtccgatggccctcccagtaactgccctccttttgcccctcgcactccttcttcatgccgctcgccccaactgggtcaacgtgattagcgatttgaagaaaatcgaggaccttatacagtctatgcatattgacgctacactgtatactgagagtgatgtacacccgtcctgtaaggtaacggccatgaaatgctttcttctggagctccaggtcatcagcttggagtctggggacgcaagcatccacgatacggttgaaaacctcatcatccttgcgaacaactctctctcatctaatggaaacgttacagagagtgggtgtaaggagtgcgaagagttggaagaaaaaaacatcaaagaatttcttcaatccttcgttcacatagtgcaaatgttcattaacacgtccactaccacacccgccccgaggccacctacgccggcaccgactatcgccagtcaacccctctctctgcgccccgaggcttgccggcctgcggctggtggggcggtccacacccggggcctggattttgcgtgcgatatatacatctgggcacctcttgccggcacctgcggagtgctgcttctctcactcgttattacgctgtactgctaa

SEQ ID NO: 305 - DNA, 2169 bp, Artificial Sequence
  Synthetic
  misc_feature: NK77.6_CD70_DB01_G07
atggccttaccagtgaccgccttgctcctgccgctggccttgctgctccacgccgccaggccggactacaaagacgatgacgataaaggcggtggtggctctggtggtggcggatcccaggtgcagctggtgcagtctggggctgaggtgaagaagcctggggcctcagtgaaggtttcctgcaaggcatctggatacaccttcaccagctactatatgcactgggtgcgacaggcccctggacaagggcttgagtggatgggatggatcaacccgaacagtggtggcacaaaatacgcacataagttccagggcagagtcaccatgaccagggacacgtccacgagcacagtctacatggagctgagcagcctgagatctgaggacacggccgtgtattactgtgctagaggactgtcaggttacgattttgactactggggccaagggaccacagtcaccgtctcctcaggtggaggcggttcaggcggaggtggctctggcggtggcggatcggacatccagatgacccagtctccatcctccctgtctgcatctgtaggagacagagtcaccatcacttgccaggcgagtcaggacattagcaactatttaaattggtatcagcagaaaccagggaaagcccctaagctcctgatctacgatgcatccaatttggaaacaggggtcccatcaaggttcagtggaagtggatctgggacagattttactttgaccatcagcagcctgcagcctgaagattttgcaacatattactgtcaacaggcttataggtggcctatcaccttcggccaagggacacgactggagattaaaaccacgacgccagcgccgcggccaccaacaccggcgcccaccatcgcgtcgcagcccctgtccctgcgcccagaggcgtgccggccagcggcggggggcgcagtgcacacgagggggctggacttcgcctgtgatatctacatctgggcgcccttggccgggacttgtggggtccttctcctgtcactggttatcaccctttactgccggagggaccagaggctgccccccgatgcccacaagccccctgggggaggcagtttccggacccccatccaagaggagcaggccgacgcccactccaccctggccaagatcagagtgaagttcagcaggagcgcagacgcccccgcgtaccagcagggccagaaccagctctataacgagctcaatctaggacgaagagaggagtacgatgttttggacaagagacgtggccgggaccctgagatggggggaaagccgagaaggaagaaccctcaggaaggcctgtacaatgaactgcagaaagataagatggcggaggcctacagtgagattgggatgaaaggcgagcgccggaggggcaaggggcacgatggcctttaccagggtctcagtacagccaccaaggacacctacgacgcccttcacatgcaggccctgccccctcgcggctctggcgagggaaggggttccctgcttacttgcggcgacgtcgaagagaatcccggtccgatggccctcccagtaactgccctccttttgcccctcgcactccttcttcatgccgctcgccccaactgggtcaacgtgattagcgatttgaagaaaatcgaggaccttatacagtctatgcatattgacgctacactgtatactgagagtgatgtacacccgtcctgtaaggtaacggccatgaaatgctttcttctggagctccaggtcatcagcttggagtctggggacgcaagcatccacgatacggttgaaaacctcatcatccttgcgaacaactctctctcatctaatggaaacgttacagagagtgggtgtaaggagtgcgaagagttggaagaaaaaaacatcaaagaatttcttcaatccttcgttcacatagtgcaaatgttcattaacacgtccactaccacacccgccccgaggccacctacgccggcaccgactatcgccagtcaacccctctctctgcgccccgaggcttgccggcctgcggctggtggggcggtccacacccggggcctggattttgcgtgcgatatatacatctgggcacctcttgccggcacctgcggagtgctgcttctctcactcgttattacgctgtactgctaa

SEQ ID NO: 306 - DNA, 2172 bp, Artificial Sequence
  Synthetic
  misc_feature: NK77.7_CD70_DB01_G11
atggccttaccagtgaccgccttgctcctgccgctggccttgctgctccacgccgccaggccggactacaaagacgatgacgataaaggcggtggtggctctggtggtggcggatcccaggtgcagctggtgcagtctggggctgaggtgaagaagcctggggcctcagtgaaggtttcctgcaaggcatctggatacaccttcaccggctactatatgcactgggtgcgacaggcccctggacaagggcttgagtggatgggatggatgaaccctaatagtggtaacacaggctacgcacagaagttccagggcagagtcaccatgaccagggacacgtccacgagcacagtctacatggagctgagcagcctgagatctgaggacacggccgtgtattactgtgctagagggaccgacgtgtatggagactttgactactggggccaagggaccctggtcaccgtctcctcaggtggaggcggttcaggcggaggtggctctggcggtggcggatcggacatccagatgacccagtctccatcctccctgtctgcatctgtaggagacagagtcaccatcacttgccgggcaagtcagagcattagcagctatttaaattggtatcagcagaaaccagggaaagcccctaagctcctgatctatgatgcatcctacttggaaacaggggtcccatcaaggttcagtggcagtggatctgggacagatttcactctcaccatcagcagtctgcaacctgaagattttgcaacttactactgtcaacagagttacacaattcctcctacgttcggccaagggaccaaggtggaaatcaaaaccacgacgccagcgccgcggccaccaacaccggcgcccaccatcgcgtcgcagcccctgtccctgcgcccagaggcgtgccggccagcggcggggggcgcagtgcacacgagggggctggacttcgcctgtgatatctacatctgggcgcccttggccgggacttgtggggtccttctcctgtcactggttatcaccctttactgccggagggaccagaggctgccccccgatgcccacaagccccctgggggaggcagtttccggacccccatccaagaggagcaggccgacgcccactccaccctggccaagatcagagtgaagttcagcaggagcgcagacgcccccgcgtaccagcagggccagaaccagctctataacgagctcaatctaggacgaagagaggagtacgatgttttggacaagagacgtggccgggaccctgagatggggggaaagccgagaaggaagaaccctcaggaaggcctgtacaatgaactgcagaaagataagatggcggaggcctacagtgagattgggatgaaaggcgagcgccggaggggcaaggggcacgatggcctttaccagggtctcagtacagccaccaaggacacctacgacgcccttcacatgcaggccctgccccctcgcggctctggcgagggaaggggttccctgcttacttgcggcgacgtcgaagagaatcccggtccgatggccctcccagtaactgccctccttttgcccctcgcactccttcttcatgccgctcgccccaactgggtcaacgtgattagcgatttgaagaaaatcgaggaccttatacagtctatgcatattgacgctacactgtatactgagagtgatgtacacccgtcctgtaaggtaacggccatgaaatgctttcttctggagctccaggtcatcagcttggagtctggggacgcaagcatccacgatacggttgaaaacctcatcatccttgcgaacaactctctctcatctaatggaaacgttacagagagtgggtgtaaggagtgcgaagagttggaagaaaaaaacatcaaagaatttcttcaatccttcgttcacatagtgcaaatgttcattaacacgtccactaccacacccgccccgaggccacctacgccggcaccgactatcgccagtcaacccctctctctgcgccccgaggcttgccggcctgcggctggtggggcggtccacacccggggcctggattttgcgtgcgatatatacatctgggcacctcttgccggcacctgcggagtgctgcttctctcactcgttattacgctgtactgctaa

SEQ ID NO: 307 - DNA, 2193 bp, Artificial Sequence
  Synthetic
  misc_feature: NK77.9_CD70_DB02_A03
atggccttaccagtgaccgccttgctcctgccgctggccttgctgctccacgccgccaggccggactacaaagacgatgacgataaaggcggtggtggctctggtggtggcggatcccaggtgcagctggtgcagtctggggctgaggtgaagaagcctgggtcctcggtgaaggtctcctgcaaggcttctggatacaccttcacagagaacgaaatgcattgggtgcgacaggcccctggacaagggcttgagtggatgggaggcatcatccctatctttggtacagcaaactacgcacagaagttccagggcagagtcacgattaccgcggacgaatccacgagcacagcctacatggagctgagcagcctgagatctgaggacacggccgtgtattactgtgcgagagagggaggaaccgccatggccaccggttattactactatgggatggacgtgtggggccaagggaccaccgtcaccgtctcctcaggtggaggcggttcaggcggaggtggctctggcggtggcggatcggacatccagatgacccagtctccatcctccctgtctgcatctgtaggagacagagtcaccatcacttgccaggcgagtcaggacattagcaactatttaaattggtatcagcagaaaccagggaaagcccctaagctcctgatctacgatgcatccaatttggaaacaggggtcccatcaaggttcagtggaagtggatctgggacagattttactctcaccatcagcagcctgcagcctgaagattttgcaacatattactgtcaacagagctattccacccctctcactttcggccaggggaccaaggtggagatcaaaaccacgacgccagcgccgcggccaccaacaccggcgcccaccatcgcgtcgcagcccctgtccctgcgcccagaggcgtgccggccagcggcggggggcgcagtgcacacgagggggctggacttcgcctgtgatatctacatctgggcgcccttggccgggacttgtggggtccttctcctgtcactggttatcaccctttactgccggagggaccagaggctgccccccgatgcccacaagccccctgggggaggcagtttccggacccccatccaagaggagcaggccgacgcccactccaccctggccaagatcagagtgaagttcagcaggagcgcagacgcccccgcgtaccagcagggccagaaccagctctataacgagctcaatctaggacgaagagaggagtacgatgttttggacaagagacgtggccgggaccctgagatggggggaaagccgagaaggaagaaccctcaggaaggcctgtacaatgaactgcagaaagataagatggcggaggcctacagtgagattgggatgaaaggcgagcgccggaggggcaaggggcacgatggcctttaccagggtctcagtacagccaccaaggacacctacgacgcccttcacatgcaggccctgccccctcgcggctctggcgagggaaggggttccctgcttacttgcggcgacgtcgaagagaatcccggtccgatggccctcccagtaactgccctccttttgcccctcgcactccttcttcatgccgctcgccccaactgggtcaacgtgattagcgatttgaagaaaatcgaggaccttatacagtctatgcatattgacgctacactgtatactgagagtgatgtacacccgtcctgtaaggtaacggccatgaaatgctttcttctggagctccaggtcatcagcttggagtctggggacgcaagcatccacgatacggttgaaaacctcatcatccttgcgaacaactctctctcatctaatggaaacgttacagagagtgggtgtaaggagtgcgaagagttggaagaaaaaaacatcaaagaatttcttcaatccttcgttcacatagtgcaaatgttcattaacacgtccactaccacacccgccccgaggccacctacgccggcaccgactatcgccagtcaacccctctctctgcgccccgaggcttgccggcctgcggctggtggggcggtccacacccggggcctggattttgcgtgcgatatatacatctgggcacctcttgccggcacctgcggagtgctgcttctctcactcgttattacgctgtactgctaa

SEQ ID NO: 308 - DNA, 2187 bp, Artificial Sequence
  Synthetic
  misc_feature: NK77.10_CD70_DB02_A04
atggccttaccagtgaccgccttgctcctgccgctggccttgctgctccacgccgccaggccggactacaaagacgatgacgataaaggcggtggtggctctggtggtggcggatcccaggtgcagctggtgcagtctggggctgaggtgaagaagcctggggcctcagtgaaggtttcctgcaaggcatctggatacaccttcaccgagaatgaaatgcactgggtgcgacaggcccctggacaagggcttgagtggatgggatggatcaactctaatggtggctacacagggtacgcactgaagttccagggcagagtcaccatgaccagggacacgtccacgagcacagtctacatggagctgagcagcctgagatctgaggacacggccgtgtattactgtgctagagccagtaattacggaggacactttgactactggggccaagggaccctggtcaccgtctcctcaggtggaggcggttcaggcggaggtggctctggcggtggcggatcggatattgtgatgactcagtctccactctccctgcccgtcacccctggagagccggcctccatctcctgcaggtctagtcagagcctcctgcattccaacggatacaactatttggattggtacctgcagaagccagggcagtctccacagctcctgatctatcaggcatctagcctggagtccggggtccctgacaggttcagtggcagtggatcaggcacagattttacactgaaaatcagcagagtggaggctgaggatgttggggtttattactgcatgcaaggaacgcactggcctccaactttcggcggagggaccaaggtggagatcaaaaccacgacgccagcgccgcggccaccaacaccggcgcccaccatcgcgtcgcagcccctgtccctgcgcccagaggcgtgccggccagcggcggggggcgcagtgcacacgagggggctggacttcgcctgtgatatctacatctgggcgcccttggccgggacttgtggggtccttctcctgtcactggttatcaccctttactgccggagggaccagaggctgccccccgatgcccacaagccccctgggggaggcagtttccggacccccatccaagaggagcaggccgacgcccactccaccctggccaagatcagagtgaagttcagcaggagcgcagacgcccccgcgtaccagcagggccagaaccagctctataacgagctcaatctaggacgaagagaggagtacgatgttttggacaagagacgtggccgggaccctgagatggggggaaagccgagaaggaagaaccctcaggaaggcctgtacaatgaactgcagaaagataagatggcggaggcctacagtgagattgggatgaaaggcgagcgccggaggggcaaggggcacgatggcctttaccagggtctcagtacagccaccaaggacacctacgacgcccttcacatgcaggccctgccccctcgcggctctggcgagggaaggggttccctgcttacttgcggcgacgtcgaagagaatcccggtccgatggccctcccagtaactgccctccttttgcccctcgcactccttcttcatgccgctcgccccaactgggtcaacgtgattagcgatttgaagaaaatcgaggaccttatacagtctatgcatattgacgctacactgtatactgagagtgatgtacacccgtcctgtaaggtaacggccatgaaatgctttcttctggagctccaggtcatcagcttggagtctggggacgcaagcatccacgatacggttgaaaacctcatcatccttgcgaacaactctctctcatctaatggaaacgttacagagagtgggtgtaaggagtgcgaagagttggaagaaaaaaacatcaaagaatttcttcaatccttcgttcacatagtgcaaatgttcattaacacgtccactaccacacccgccccgaggccacctacgccggcaccgactatcgccagtcaacccctctctctgcgccccgaggcttgccggcctgcggctggtggggcggtccacacccggggcctggattttgcgtgcgatatatacatctgggcacctcttgccggcacctgcggagtgctgcttctctcactcgttattacgctgtactgctaa

SEQ ID NO: 309 - DNA, 2172 bp, Artificial Sequence
  Synthetic
  misc_feature: NK77.11_CD70_DB02_A05
atggccttaccagtgaccgccttgctcctgccgctggccttgctgctccacgccgccaggccggactacaaagacgatgacgataaaggcggtggtggctctggtggtggcggatcccaggtgcagctggtgcagtctggggctgaggtgaagaagcctggggcctcagtgaaggtttcctgcaaggcatctggatacaccttcaccagctactatatgcactgggtgcgacaggcccctggacaagggcttgagtggatgggaataatcaaccctagtggtggcagcacaatatacgcacagaagttccagggcagagtcaccatgaccagggacacgtccacgagcacagtctacatggagctgagcagcctgagatctgaggacacggccgtgtattactgtgctaaagacatgggagcgtgggcagctggttttgactactggggccaagggaccctggtcaccgtctcctcaggtggaggcggttcaggcggaggtggctctggcggtggcggatcggacatccagatgacccagtctccatcctccctgtctgcatctgtaggagacagagtcaccatcacttgccaagcaagtcaggacattagcaactatttaaattggtatcagcagaaaccagggaaagcccctaagctcctgatctatgctacctccaccttggctaacggggtcccatcaaggttcagtggcagtggatctgggacagatttcactctcaccatcagcagtctgcaacctgaagattttgcaacttactactgtcaacagagttacagtacgcttaccttcggccaagggacacgactggagattaaaaccacgacgccagcgccgcggccaccaacaccggcgcccaccatcgcgtcgcagcccctgtccctgcgcccagaggcgtgccggccagcggcggggggcgcagtgcacacgagggggctggacttcgcctgtgatatctacatctgggcgcccttggccgggacttgtggggtccttctcctgtcactggttatcaccctttactgccggagggaccagaggctgccccccgatgcccacaagccccctgggggaggcagtttccggacccccatccaagaggagcaggccgacgcccactccaccctggccaagatcagagtgaagttcagcaggagcgcagacgcccccgcgtaccagcagggccagaaccagctctataacgagctcaatctaggacgaagagaggagtacgatgttttggacaagagacgtggccgggaccctgagatggggggaaagccgagaaggaagaaccctcaggaaggcctgtacaatgaactgcagaaagataagatggcggaggcctacagtgagattgggatgaaaggcgagcgccggaggggcaaggggcacgatggcctttaccagggtctcagtacagccaccaaggacacctacgacgcccttcacatgcaggccctgccccctcgcggctctggcgagggaaggggttccctgcttacttgcggcgacgtcgaagagaatcccggtccgatggccctcccagtaactgccctccttttgcccctcgcactccttcttcatgccgctcgccccaactgggtcaacgtgattagcgatttgaagaaaatcgaggaccttatacagtctatgcatattgacgctacactgtatactgagagtgatgtacacccgtcctgtaaggtaacggccatgaaatgctttcttctggagctccaggtcatcagcttggagtctggggacgcaagcatccacgatacggttgaaaacctcatcatccttgcgaacaactctctctcatctaatggaaacgttacagagagtgggtgtaaggagtgcgaagagttggaagaaaaaaacatcaaagaatttcttcaatccttcgttcacatagtgcaaatgttcattaacacgtccactaccacacccgccccgaggccacctacgccggcaccgactatcgccagtcaacccctctctctgcgccccgaggcttgccggcctgcggctggtggggcggtccacacccggggcctggattttgcgtgcgatatatacatctgggcacctcttgccggcacctgcggagtgctgcttctctcactcgttattacgctgtactgctaa

SEQ ID NO: 310 - DNA, 2175 bp, Artificial Sequence
  Synthetic
  misc_feature: NK77.12_CD70_DB02_A06
atggccttaccagtgaccgccttgctcctgccgctggccttgctgctccacgccgccaggccggactacaaagacgatgacgataaaggcggtggtggctctggtggtggcggatcccaggtgcagctggtgcagtctggggctgaggtgaagaagcctggggcctcagtgaaggtttcctgcaaggcatctggatacaccttcaccgggtactatatgcactgggtgcgacaggcccctggacaagggcttgagtggatgggatggatcaacccaaatagtggtgatacagggtacgcacagaagttccagggcagagtcaccatgaccagggacacgtccacgagcacagtctacatggagctgagcagcctgagatctgaggacacggccgtgtattactgtgctagatccgtcaacgactacggtgattacgacggttactggggccaagggaccctggtcaccgtctcctcaggtggaggcggttcaggcggaggtggctctggcggtggcggatcggacatccagatgacccagtctccatcctccctgtctgcatctgtaggagacagagtcaccatcacttgccaggcgagtcaggacattagcaactatttaaattggtatcagcagaaaccagggaaagcccctaagctcctgatctacgatgcatccaatttggaaacaggggtcccatcaaggttcagtggaagtggatctgggacagattttactctgaccatcagcagcctgcagcctgaagattttgcaacatattactgtcaacagtcttacagtacgcctcctacgttcggccaagggaccaaggtggaaatcaaaaccacgacgccagcgccgcggccaccaacaccggcgcccaccatcgcgtcgcagcccctgtccctgcgcccagaggcgtgccggccagcggcggggggcgcagtgcacacgagggggctggacttcgcctgtgatatctacatctgggcgcccttggccgggacttgtggggtccttctcctgtcactggttatcaccctttactgccggagggaccagaggctgccccccgatgcccacaagccccctgggggaggcagtttccggacccccatccaagaggagcaggccgacgcccactccaccctggccaagatcagagtgaagttcagcaggagcgcagacgcccccgcgtaccagcagggccagaaccagctctataacgagctcaatctaggacgaagagaggagtacgatgttttggacaagagacgtggccgggaccctgagatggggggaaagccgagaaggaagaaccctcaggaaggcctgtacaatgaactgcagaaagataagatggcggaggcctacagtgagattgggatgaaaggcgagcgccggaggggcaaggggcacgatggcctttaccagggtctcagtacagccaccaaggacacctacgacgcccttcacatgcaggccctgccccctcgcggctctggcgagggaaggggttccctgcttacttgcggcgacgtcgaagagaatcccggtccgatggccctcccagtaactgccctccttttgcccctcgcactccttcttcatgccgctcgccccaactgggtcaacgtgattagcgatttgaagaaaatcgaggaccttatacagtctatgcatattgacgctacactgtatactgagagtgatgtacacccgtcctgtaaggtaacggccatgaaatgctttcttctggagctccaggtcatcagcttggagtctggggacgcaagcatccacgatacggttgaaaacctcatcatccttgcgaacaactctctctcatctaatggaaacgttacagagagtgggtgtaaggagtgcgaagagttggaagaaaaaaacatcaaagaatttcttcaatccttcgttcacatagtgcaaatgttcattaacacgtccactaccacacccgccccgaggccacctacgccggcaccgactatcgccagtcaacccctctctctgcgccccgaggcttgccggcctgcggctggtggggcggtccacacccggggcctggattttgcgtgcgatatatacatctgggcacctcttgccggcacctgcggagtgctgcttctctcactcgttattacgctgtactgctaa

SEQ ID NO: 311 - DNA, 2175 bp, Artificial Sequence
  Synthetic
  misc_feature: NK77.13_CD70_DB02_A07
atggccttaccagtgaccgccttgctcctgccgctggccttgctgctccacgccgccaggccggactacaaagacgatgacgataaaggcggtggtggctctggtggtggcggatcccaggtgcagctggtgcagtctggggctgaggtgaagaagcctggggcctcagtgaaggtttcctgcaaggcatctggatacaccttcaccggatactatatgcactgggtgcgacaggcccctggacaagggcttgagtggatgggaataatcaaccctagtggtgggagcacaagctacgcacagaagttccagggcagagtcaccatgaccagggacacgtccacgagcacagtctacatggagctgagcagcctgagatctgaggacacggccgtgtattactgtgctagagattacggtgattatgacgcctcgtttgactactggggccaagggaccctggtcaccgtctcctcaggtggaggcggttcaggcggaggtggctctggcggtggcggatcggacatccagatgacccagtctccatcctccctgtctgcatctgtaggagacagagtcaccatcacttgccgggcaagtcagagcattgacaattggttagcgtggtatcagcagaaaccagggaaagcccctaagctcctgatctatgctgcatccacattgcaaagtggggtcccatcaaggttcagtggcagtggatctgggacagatttcactctcaccatcagcagtctgcaacctgaagattttgcaacttactactgtcaacagagttacgatagtcctcccacttttggccaggggaccaagctggagatcaaaaccacgacgccagcgccgcggccaccaacaccggcgcccaccatcgcgtcgcagcccctgtccctgcgcccagaggcgtgccggccagcggcggggggcgcagtgcacacgagggggctggacttcgcctgtgatatctacatctgggcgcccttggccgggacttgtggggtccttctcctgtcactggttatcaccctttactgccggagggaccagaggctgccccccgatgcccacaagccccctgggggaggcagtttccggacccccatccaagaggagcaggccgacgcccactccaccctggccaagatcagagtgaagttcagcaggagcgcagacgcccccgcgtaccagcagggccagaaccagctctataacgagctcaatctaggacgaagagaggagtacgatgttttggacaagagacgtggccgggaccctgagatggggggaaagccgagaaggaagaaccctcaggaaggcctgtacaatgaactgcagaaagataagatggcggaggcctacagtgagattgggatgaaaggcgagcgccggaggggcaaggggcacgatggcctttaccagggtctcagtacagccaccaaggacacctacgacgcccttcacatgcaggccctgccccctcgcggctctggcgagggaaggggttccctgcttacttgcggcgacgtcgaagagaatcccggtccgatggccctcccagtaactgccctccttttgcccctcgcactccttcttcatgccgctcgccccaactgggtcaacgtgattagcgatttgaagaaaatcgaggaccttatacagtctatgcatattgacgctacactgtatactgagagtgatgtacacccgtcctgtaaggtaacggccatgaaatgctttcttctggagctccaggtcatcagcttggagtctggggacgcaagcatccacgatacggttgaaaacctcatcatccttgcgaacaactctctctcatctaatggaaacgttacagagagtgggtgtaaggagtgcgaagagttggaagaaaaaaacatcaaagaatttcttcaatccttcgttcacatagtgcaaatgttcattaacacgtccactaccacacccgccccgaggccacctacgccggcaccgactatcgccagtcaacccctctctctgcgccccgaggcttgccggcctgcggctggtggggcggtccacacccggggcctggattttgcgtgcgatatatacatctgggcacctcttgccggcacctgcggagtgctgcttctctcactcgttattacgctgtactgctaa

SEQ ID NO: 312 - DNA, 2166 bp, Artificial Sequence
  Synthetic
  misc_feature: NK77.14_CD70_DB02_A08
atggccttaccagtgaccgccttgctcctgccgctggccttgctgctccacgccgccaggccggactacaaagacgatgacgataaaggcggtggtggctctggtggtggcggatcccaggtgcagctggtgcagtctggggctgaggtgaagaagcctggggcctcagtgaaggtttcctgcaaggcatctggatacaccttcaccagctacgatatcaattgggtgcgacaggcccctggacaagggcttgagtggatgggaataatcaacccctccgatggtagcacaatctacgcacagaacttccagggcagagtcaccatgaccagggacacgtccacgagcacagtctacatggagctgagcagcctgagatctgaggacacggccgtgtattactgtgtgaaggaagaggcctggtacttcgatctctggggccgtggcaccctggtcactgtctcctcaggtggaggcggttcaggcggaggtggctctggcggtggcggatcggacatccagatgacccagtctccatcctccctgtctgcatctgtaggagacagagtcaccatcacttgccaggcgagtcaggacattagcaactatttaaattggtatcagcagaaaccagggaaagcccctaagctcctgatctacgatgcatccaatttggaaacaggggtcccatcaaggttcagtggaagtggatctgggacagattttactttgaccatcagcagcctgcagcctgaagattttgcaacatattactgtcaacagtcctatagcacccctctcactttcggcggagggaccaaggtggagatcaaaaccacgacgccagcgccgcggccaccaacaccggcgcccaccatcgcgtcgcagcccctgtccctgcgcccagaggcgtgccggccagcggcggggggcgcagtgcacacgagggggctggacttcgcctgtgatatctacatctgggcgcccttggccgggacttgtggggtccttctcctgtcactggttatcaccctttactgccggagggaccagaggctgccccccgatgcccacaagccccctgggggaggcagtttccggacccccatccaagaggagcaggccgacgcccactccaccctggccaagatcagagtgaagttcagcaggagcgcagacgcccccgcgtaccagcagggccagaaccagctctataacgagctcaatctaggacgaagagaggagtacgatgttttggacaagagacgtggccgggaccctgagatggggggaaagccgagaaggaagaaccctcaggaaggcctgtacaatgaactgcagaaagataagatggcggaggcctacagtgagattgggatgaaaggcgagcgccggaggggcaaggggcacgatggcctttaccagggtctcagtacagccaccaaggacacctacgacgcccttcacatgcaggccctgccccctcgcggctctggcgagggaaggggttccctgcttacttgcggcgacgtcgaagagaatcccggtccgatggccctcccagtaactgccctccttttgcccctcgcactccttcttcatgccgctcgccccaactgggtcaacgtgattagcgatttgaagaaaatcgaggaccttatacagtctatgcatattgacgctacactgtatactgagagtgatgtacacccgtcctgtaaggtaacggccatgaaatgctttcttctggagctccaggtcatcagcttggagtctggggacgcaagcatccacgatacggttgaaaacctcatcatccttgcgaacaactctctctcatctaatggaaacgttacagagagtgggtgtaaggagtgcgaagagttggaagaaaaaaacatcaaagaatttcttcaatccttcgttcacatagtgcaaatgttcattaacacgtccactaccacacccgccccgaggccacctacgccggcaccgactatcgccagtcaacccctctctctgcgccccgaggcttgccggcctgcggctggtggggcggtccacacccggggcctggattttgcgtgcgatatatacatctgggcacctcttgccggcacctgcggagtgctgcttctctcactcgttattacgctgtactgctaa

SEQ ID NO: 313 - DNA, 2166 bp, Artificial Sequence
  Synthetic
  misc_feature: NK77.15_CD70_DB02_A09
atggccttaccagtgaccgccttgctcctgccgctggccttgctgctccacgccgccaggccggactacaaagacgatgacgataaaggcggtggtggctctggtggtggcggatcccaggtgcagctggtgcagtctggggctgaggtgaagaagcctggggcctcagtgaaggtttcctgcaaggcatctggatacaccttcaccagctactatatgcactgggtgcgacaggcccctggacaagggcttgagtggatgggatggatgaaccctgataacggtgatacagggtacgcacagatgttccagggcagagtcaccatgaccagggacacgtccacgagcacagtctacatggagctgagcagcctgagatctgaggacacggccgtgtattactgtgcttcaggggattactatgacatcttgtactggggccaagggaccctggtcaccgtctcctcaggtggaggcggttcaggcggaggtggctctggcggtggcggatcggacatccagatgacccagtctccatcctccctgtctgcatctgtaggagacagagtcaccatcacttgccaggcgagtcaggacattagcaactatttaaattggtatcagcagaaaccagggaaagcccctaagctcctgatctacgatgtgtccaatttggaaacaggggtcccatcaaggttcagtggaagtggatctgggacagattttactctcaccatcagcagcctgcagcctgaagattttgcaacatattactgtcaacaggctaattccttccctctcactttcggcggagggaccaaggtggagatcaaaaccacgacgccagcgccgcggccaccaacaccggcgcccaccatcgcgtcgcagcccctgtccctgcgcccagaggcgtgccggccagcggcggggggcgcagtgcacacgagggggctggacttcgcctgtgatatctacatctgggcgcccttggccgggacttgtggggtccttctcctgtcactggttatcaccctttactgccggagggaccagaggctgccccccgatgcccacaagccccctgggggaggcagtttccggacccccatccaagaggagcaggccgacgcccactccaccctggccaagatcagagtgaagttcagcaggagcgcagacgcccccgcgtaccagcagggccagaaccagctctataacgagctcaatctaggacgaagagaggagtacgatgttttggacaagagacgtggccgggaccctgagatggggggaaagccgagaaggaagaaccctcaggaaggcctgtacaatgaactgcagaaagataagatggcggaggcctacagtgagattgggatgaaaggcgagcgccggaggggcaaggggcacgatggcctttaccagggtctcagtacagccaccaaggacacctacgacgcccttcacatgcaggccctgccccctcgcggctctggcgagggaaggggttccctgcttacttgcggcgacgtcgaagagaatcccggtccgatggccctcccagtaactgccctccttttgcccctcgcactccttcttcatgccgctcgccccaactgggtcaacgtgattagcgatttgaagaaaatcgaggaccttatacagtctatgcatattgacgctacactgtatactgagagtgatgtacacccgtcctgtaaggtaacggccatgaaatgctttcttctggagctccaggtcatcagcttggagtctggggacgcaagcatccacgatacggttgaaaacctcatcatccttgcgaacaactctctctcatctaatggaaacgttacagagagtgggtgtaaggagtgcgaagagttggaagaaaaaaacatcaaagaatttcttcaatccttcgttcacatagtgcaaatgttcattaacacgtccactaccacacccgccccgaggccacctacgccggcaccgactatcgccagtcaacccctctctctgcgccccgaggcttgccggcctgcggctggtggggcggtccacacccggggcctggattttgcgtgcgatatatacatctgggcacctcttgccggcacctgcggagtgctgcttctctcactcgttattacgctgtactgctaa

SEQ ID NO: 314 - DNA, 2169 bp, Artificial Sequence
  Synthetic
  misc_feature: NK77.16_CD70_DB02_A11
atggccttaccagtgaccgccttgctcctgccgctggccttgctgctccacgccgccaggccggactacaaagacgatgacgataaaggcggtggtggctctggtggtggcggatcccaggtgcagctggtgcagtctggggctgaggtgaagaagcctggggcctcagtgaaggtttcctgcaaggcatctggatacaccttcaccagctactatatgcactgggtgcgacaggcccctggacaagggcttgagtggatgggatggatgaaccccaacagtggtgatacaggatacgcacagaagttccagggcagagtcaccatgaccagggacacgtccacgagcacagtctacatggagctgagcagcctgagatctgaggacacggccgtgtattactgtgctagagggcccagcgggtacgaatttgactactggggccaagggaccctggtcaccgtctcctcaggtggaggcggttcaggcggaggtggctctggcggtggcggatcggacatccagatgacccagtctccatcctccctgtctgcatctgtaggagacagagtcaccatcacttgccgggcaagtcagaccattagcaattatttaaattggtatcagcagaaaccagggaaagcccctaagctcctgatctatgacgcatccagtttggaaagtggggtcccatcaaggttcagtggcagtggatctgggacagatttcactctcaccatcagcagtctgcaacctgaagattttgcaacttactactgtcaacaggcaatcagttttcctctcactttcggcggagggaccaaggtggagatcaaaaccacgacgccagcgccgcggccaccaacaccggcgcccaccatcgcgtcgcagcccctgtccctgcgcccagaggcgtgccggccagcggcggggggcgcagtgcacacgagggggctggacttcgcctgtgatatctacatctgggcgcccttggccgggacttgtggggtccttctcctgtcactggttatcaccctttactgccggagggaccagaggctgccccccgatgcccacaagccccctgggggaggcagtttccggacccccatccaagaggagcaggccgacgcccactccaccctggccaagatcagagtgaagttcagcaggagcgcagacgcccccgcgtaccagcagggccagaaccagctctataacgagctcaatctaggacgaagagaggagtacgatgttttggacaagagacgtggccgggaccctgagatggggggaaagccgagaaggaagaaccctcaggaaggcctgtacaatgaactgcagaaagataagatggcggaggcctacagtgagattgggatgaaaggcgagcgccggaggggcaaggggcacgatggcctttaccagggtctcagtacagccaccaaggacacctacgacgcccttcacatgcaggccctgccccctcgcggctctggcgagggaaggggttccctgcttacttgcggcgacgtcgaagagaatcccggtccgatggccctcccagtaactgccctccttttgcccctcgcactccttcttcatgccgctcgccccaactgggtcaacgtgattagcgatttgaagaaaatcgaggaccttatacagtctatgcatattgacgctacactgtatactgagagtgatgtacacccgtcctgtaaggtaacggccatgaaatgctttcttctggagctccaggtcatcagcttggagtctggggacgcaagcatccacgatacggttgaaaacctcatcatccttgcgaacaactctctctcatctaatggaaacgttacagagagtgggtgtaaggagtgcgaagagttggaagaaaaaaacatcaaagaatttcttcaatccttcgttcacatagtgcaaatgttcattaacacgtccactaccacacccgccccgaggccacctacgccggcaccgactatcgccagtcaacccctctctctgcgccccgaggcttgccggcctgcggctggtggggcggtccacacccggggcctggattttgcgtgcgatatatacatctgggcacctcttgccggcacctgcggagtgctgcttctctcactcgttattacgctgtactgctaa

SEQ ID NO: 315 - DNA, 2181 bp, Artificial Sequence
  Synthetic
  misc_feature: NK77.17_CD70_DB02_B06
atggccttaccagtgaccgccttgctcctgccgctggccttgctgctccacgccgccaggccggactacaaagacgatgacgataaaggcggtggtggctctggtggtggcggatcccaggtgcagctggtgcagtctggggctgaggtgaagaagcctggggcctcagtgaaggtttcctgcaaggcatctggatacaccttcaccgattactatatgcactgggtgcgacaggcccctggacaagggcttgagtggatgggaataatcaaccctaatagtggtggaacaaattacgcacagaagttccagggcagagtcaccatgaccagggacacgtccacgagcacagtctacatggagctgagcagcctgagatctgaggacacggccgtgtattactgtgctagagattttagtgtgtatgctgctgcagatggcatggatgtctggggccaagggacattggtcaccgtctcttcaggtggaggcggttcaggcggaggtggctctggcggtggcggatcggacatccagatgacccagtctccatcctccctgtctgcatctgtaggagacagagtcaccatcacttgccgggcaagtcagagcattagcagctatttaaattggtatcagcagaaaccagggaaagcccctaagctcctgatctatgacgcatccaatttggccaccggggtcccatcaaggttcagtggcagtggatctgggacagatttcactctcaccatcagcagtctgcaacctgaagattttgcaacttactactgtcaacagagtgatagttcacctctcactttcggccaagggaccaaggtggagatcaaaaccacgacgccagcgccgcggccaccaacaccggcgcccaccatcgcgtcgcagcccctgtccctgcgcccagaggcgtgccggccagcggcggggggcgcagtgcacacgagggggctggacttcgcctgtgatatctacatctgggcgcccttggccgggacttgtggggtccttctcctgtcactggttatcaccctttactgccggagggaccagaggctgccccccgatgcccacaagccccctgggggaggcagtttccggacccccatccaagaggagcaggccgacgcccactccaccctggccaagatcagagtgaagttcagcaggagcgcagacgcccccgcgtaccagcagggccagaaccagctctataacgagctcaatctaggacgaagagaggagtacgatgttttggacaagagacgtggccgggaccctgagatggggggaaagccgagaaggaagaaccctcaggaaggcctgtacaatgaactgcagaaagataagatggcggaggcctacagtgagattgggatgaaaggcgagcgccggaggggcaaggggcacgatggcctttaccagggtctcagtacagccaccaaggacacctacgacgcccttcacatgcaggccctgccccctcgcggctctggcgagggaaggggttccctgcttacttgcggcgacgtcgaagagaatcccggtccgatggccctcccagtaactgccctccttttgcccctcgcactccttcttcatgccgctcgccccaactgggtcaacgtgattagcgatttgaagaaaatcgaggaccttatacagtctatgcatattgacgctacactgtatactgagagtgatgtacacccgtcctgtaaggtaacggccatgaaatgctttcttctggagctccaggtcatcagcttggagtctggggacgcaagcatccacgatacggttgaaaacctcatcatccttgcgaacaactctctctcatctaatggaaacgttacagagagtgggtgtaaggagtgcgaagagttggaagaaaaaaacatcaaagaatttcttcaatccttcgttcacatagtgcaaatgttcattaacacgtccactaccacacccgccccgaggccacctacgccggcaccgactatcgccagtcaacccctctctctgcgccccgaggcttgccggcctgcggctggtggggcggtccacacccggggcctggattttgcgtgcgatatatacatctgggcacctcttgccggcacctgcggagtgctgcttctctcactcgttattacgctgtactgctaa

SEQ ID NO: 316 - DNA, 2178 bp, Artificial Sequence
  Synthetic
  misc_feature: NK77.18_CD70_DB02_B09
atggccttaccagtgaccgccttgctcctgccgctggccttgctgctccacgccgccaggccggactacaaagacgatgacgataaaggcggtggtggctctggtggtggcggatcccaggtgcagctggtgcagtctggggctgaggtgaagaagcctggggcctcagtgaaggtttcctgcaaggcatctggatacaccttcaccgggtactatatgcactgggtgcgacaggcccctggacaagggcttgagtggatgggaataatcaaccctggggatggcggtacaatctacgcacagaatttccagggcagagtcaccatgaccagggacacgtccacgagcacagtctacatggagctgagcagcctgagatctgaggacacggccgtgtattactgtgctagaggattcggcgagtcagcccccgatgcttttgatatctggggccaagggacaatggtcaccgtctcttcaggtggaggcggttcaggcggaggtggctctggcggtggcggatcggacatccagatgacccagtctccatcctccctgtctgcatctgtaggagacagagtcaccatcacttgccaggcaagtcaggacattagcaattatttaaattggtatcagcagaaaccagggaaagcccctaagctcctgatctatggtgcaacgacattgcaaagtggggtcccatcaaggttcagtggcagtggatctgggacagatttcactctcaccatcagcagtctgcaacctgaagattttgcaacttactactgtcaacaggcggatagttttccttacacttttggccaggggaccaagctggagatcaaaaccacgacgccagcgccgcggccaccaacaccggcgcccaccatcgcgtcgcagcccctgtccctgcgcccagaggcgtgccggccagcggcggggggcgcagtgcacacgagggggctggacttcgcctgtgatatctacatctgggcgcccttggccgggacttgtggggtccttctcctgtcactggttatcaccctttactgccggagggaccagaggctgccccccgatgcccacaagccccctgggggaggcagtttccggacccccatccaagaggagcaggccgacgcccactccaccctggccaagatcagagtgaagttcagcaggagcgcagacgcccccgcgtaccagcagggccagaaccagctctataacgagctcaatctaggacgaagagaggagtacgatgttttggacaagagacgtggccgggaccctgagatggggggaaagccgagaaggaagaaccctcaggaaggcctgtacaatgaactgcagaaagataagatggcggaggcctacagtgagattgggatgaaaggcgagcgccggaggggcaaggggcacgatggcctttaccagggtctcagtacagccaccaaggacacctacgacgcccttcacatgcaggccctgccccctcgcggctctggcgagggaaggggttccctgcttacttgcggcgacgtcgaagagaatcccggtccgatggccctcccagtaactgccctccttttgcccctcgcactccttcttcatgccgctcgccccaactgggtcaacgtgattagcgatttgaagaaaatcgaggaccttatacagtctatgcatattgacgctacactgtatactgagagtgatgtacacccgtcctgtaaggtaacggccatgaaatgctttcttctggagctccaggtcatcagcttggagtctggggacgcaagcatccacgatacggttgaaaacctcatcatccttgcgaacaactctctctcatctaatggaaacgttacagagagtgggtgtaaggagtgcgaagagttggaagaaaaaaacatcaaagaatttcttcaatccttcgttcacatagtgcaaatgttcattaacacgtccactaccacacccgccccgaggccacctacgccggcaccgactatcgccagtcaacccctctctctgcgccccgaggcttgccggcctgcggctggtggggcggtccacacccggggcctggattttgcgtgcgatatatacatctgggcacctcttgccggcacctgcggagtgctgcttctctcactcgttattacgctgtactgctaa

SEQ ID NO: 317 - DNA, 2169 bp, Artificial Sequence
  Synthetic
  misc_feature: NK77.19_CD70_DB02_C03
atggccttaccagtgaccgccttgctcctgccgctggccttgctgctccacgccgccaggccggactacaaagacgatgacgataaaggcggtggtggctctggtggtggcggatcccaggtgcagctggtgcagtctggggctgaggtgaagaagcctggggcctcagtgaaggtttcctgcaaggcatctggatacaccttcaccggttactatatgcactgggtgcgacaggcccctggacaagggcttgagtggatgggaataatcaaccctagtggtgggagcacaagctacgcacagaagttccagggcagagtcaccatgaccagggacacgtccacgagcacagtctacatggagctgagcagcctgagatctgaggacacggccgtgtattactgtgctgccgggacagagatctactacatggacgtctggggcaaagggaccacggtcaccgtctcctcaggtggaggcggttcaggcggaggtggctctggcggtggcggatcggacatccagatgacccagtctccatcctccctgtctgcatctgtaggagacagagtcaccatcacttgcagggcgagtcagactattgacatctatttaaattggtatcagcagaaaccagggaaagcccctaagctcctgatctacgatgcatccaatttggaaacaggggtcccatcaaggttcagtggaagtggatctgggacagattttactttgaccatcagcagcctgcagcctgaagattttgcaacatattactgtcaacaggcagattccttccctctcactttcggcggagggaccaaggtggagatcaaaaccacgacgccagcgccgcggccaccaacaccggcgcccaccatcgcgtcgcagcccctgtccctgcgcccagaggcgtgccggccagcggcggggggcgcagtgcacacgagggggctggacttcgcctgtgatatctacatctgggcgcccttggccgggacttgtggggtccttctcctgtcactggttatcaccctttactgccggagggaccagaggctgccccccgatgcccacaagccccctgggggaggcagtttccggacccccatccaagaggagcaggccgacgcccactccaccctggccaagatcagagtgaagttcagcaggagcgcagacgcccccgcgtaccagcagggccagaaccagctctataacgagctcaatctaggacgaagagaggagtacgatgttttggacaagagacgtggccgggaccctgagatggggggaaagccgagaaggaagaaccctcaggaaggcctgtacaatgaactgcagaaagataagatggcggaggcctacagtgagattgggatgaaaggcgagcgccggaggggcaaggggcacgatggcctttaccagggtctcagtacagccaccaaggacacctacgacgcccttcacatgcaggccctgccccctcgcggctctggcgagggaaggggttccctgcttacttgcggcgacgtcgaagagaatcccggtccgatggccctcccagtaactgccctccttttgcccctcgcactccttcttcatgccgctcgccccaactgggtcaacgtgattagcgatttgaagaaaatcgaggaccttatacagtctatgcatattgacgctacactgtatactgagagtgatgtacacccgtcctgtaaggtaacggccatgaaatgctttcttctggagctccaggtcatcagcttggagtctggggacgcaagcatccacgatacggttgaaaacctcatcatccttgcgaacaactctctctcatctaatggaaacgttacagagagtgggtgtaaggagtgcgaagagttggaagaaaaaaacatcaaagaatttcttcaatccttcgttcacatagtgcaaatgttcattaacacgtccactaccacacccgccccgaggccacctacgccggcaccgactatcgccagtcaacccctctctctgcgccccgaggcttgccggcctgcggctggtggggcggtccacacccggggcctggattttgcgtgcgatatatacatctgggcacctcttgccggcacctgcggagtgctgcttctctcactcgttattacgctgtactgctaa

SEQ ID NO: 318 - DNA, 2196 bp, Artificial Sequence
  Synthetic
  misc_feature: NK77.20_CD70_DB02_C04
atggccttaccagtgaccgccttgctcctgccgctggccttgctgctccacgccgccaggccggactacaaagacgatgacgataaaggcggtggtggctctggtggtggcggatcccaagtgcagttagttcagtcaggcgccgaagttaaaaaacccggagcgagcgtaaaagtgtcttgtaaagccagtggcggcacatttagctcttatgcgatatcatgggttcgccaagcaccaggccagggcctggaatggatggggatgataaatccaagtgatggcgccactacttacgcacagaagttccagggcagagtcaccatgaccagggacacgtccacgagcacagtctacatggagctgagcagcctgagatctgaggacacggccgtgtattactgtgctagagagagggagctactacatttcgccacaaattattactactatggtatggacgtgtggggccaagggaccaccgtcaccgtctcctcaggtggaggcggttcaggcggaggtggctctggcggtggcggatcggacatccagatgacccagtctccatcttctctgtctgcatctgtaggagacagagtcaccatcacttgtcgggcgagtcagggtattagcaacaacttaaattggtatcagcagaaaccagggaaagcccctaagctcctgatctatgctgcatccagtttgcacagtggggtcccatcaaggttcagcggcagtggatctgggacagatttcactctcactatcagcagcctgcagcctgaagattttgcaacttactattgtcaacaggctgatgctttccctctcactttcggcggagggaccaaggtggagatcaaaaccacgacgccagcgccgcggccaccaacaccggcgcccaccatcgcgtcgcagcccctgtccctgcgcccagaggcgtgccggccagcggcggggggcgcagtgcacacgagggggctggacttcgcctgtgatatctacatctgggcgcccttggccgggacttgtggggtccttctcctgtcactggttatcaccctttactgccggagggaccagaggctgccccccgatgcccacaagccccctgggggaggcagtttccggacccccatccaagaggagcaggccgacgcccactccaccctggccaagatcagagtgaagttcagcaggagcgcagacgcccccgcgtaccagcagggccagaaccagctctataacgagctcaatctaggacgaagagaggagtacgatgttttggacaagagacgtggccgggaccctgagatggggggaaagccgagaaggaagaaccctcaggaaggcctgtacaatgaactgcagaaagataagatggcggaggcctacagtgagattgggatgaaaggcgagcgccggaggggcaaggggcacgatggcctttaccagggtctcagtacagccaccaaggacacctacgacgcccttcacatgcaggccctgccccctcgcggctctggcgagggaaggggttccctgcttacttgcggcgacgtcgaagagaatcccggtccgatggccctcccagtaactgccctccttttgcccctcgcactccttcttcatgccgctcgccccaactgggtcaacgtgattagcgatttgaagaaaatcgaggaccttatacagtctatgcatattgacgctacactgtatactgagagtgatgtacacccgtcctgtaaggtaacggccatgaaatgctttcttctggagctccaggtcatcagcttggagtctggggacgcaagcatccacgatacggttgaaaacctcatcatccttgcgaacaactctctctcatctaatggaaacgttacagagagtgggtgtaaggagtgcgaagagttggaagaaaaaaacatcaaagaatttcttcaatccttcgttcacatagtgcaaatgttcattaacacgtccactaccacacccgccccgaggccacctacgccggcaccgactatcgccagtcaacccctctctctgcgccccgaggcttgccggcctgcggctggtggggcggtccacacccggggcctggattttgcgtgcgatatatacatctgggcacctcttgccggcacctgcggagtgctgcttctctcactcgttattacgctgtactgctaa

SEQ ID NO: 319 - DNA, 2184 bp, Artificial Sequence
  Synthetic
  misc_feature: NK77.22_CD70_DB02_C07
atggccttaccagtgaccgccttgctcctgccgctggccttgctgctccacgccgccaggccggactacaaagacgatgacgataaaggcggtggtggctctggtggtggcggatcccaggtgcagctggtgcagtctggggctgaggtgaagaagcctggggcctcagtgaaggtttcctgcaaggcatctggatacaccttcacccggaactatatgcactgggtgcgacaggcccctggacaagggcttgagtggatgggatggatctctcctgacaatggtgttacaaattacgcacagaatttccagggcagagtcaccatgaccagggacacgtccacgagcacagtctacatggagctgagcagcctgagatctgaggacacggccgtgtattactgtgctaagacacaaggctcatccagctggtatcagtggtacttcgatctctggggccgtggcaccctggtcactgtctcctcaggtggaggcggttcaggcggaggtggctctggcggtggcggatcggacatccagatgacccagtctccatcctccctgtctgcatctgtaggagacagagtcaccatcacttgccgggcaagtcagagcattggaacctggttagcctggtatcagcagaaaccagggaaagcccctaagctcctgatctatgctgcatccagtttgcaaagtggggtcccatcaaggttcagtggcagtggatctgggacagatttcactctcaccatcagcagtctgcaacctgaagattttgcaacttactactgtcaacagagttacaccacccctattacgttcggccaagggaccaaggtggaaatcaaaaccacgacgccagcgccgcggccaccaacaccggcgcccaccatcgcgtcgcagcccctgtccctgcgcccagaggcgtgccggccagcggcggggggcgcagtgcacacgagggggctggacttcgcctgtgatatctacatctgggcgcccttggccgggacttgtggggtccttctcctgtcactggttatcaccctttactgccggagggaccagaggctgccccccgatgcccacaagccccctgggggaggcagtttccggacccccatccaagaggagcaggccgacgcccactccaccctggccaagatcagagtgaagttcagcaggagcgcagacgcccccgcgtaccagcagggccagaaccagctctataacgagctcaatctaggacgaagagaggagtacgatgttttggacaagagacgtggccgggaccctgagatggggggaaagccgagaaggaagaaccctcaggaaggcctgtacaatgaactgcagaaagataagatggcggaggcctacagtgagattgggatgaaaggcgagcgccggaggggcaaggggcacgatggcctttaccagggtctcagtacagccaccaaggacacctacgacgcccttcacatgcaggccctgccccctcgcggctctggcgagggaaggggttccctgcttacttgcggcgacgtcgaagagaatcccggtccgatggccctcccagtaactgccctccttttgcccctcgcactccttcttcatgccgctcgccccaactgggtcaacgtgattagcgatttgaagaaaatcgaggaccttatacagtctatgcatattgacgctacactgtatactgagagtgatgtacacccgtcctgtaaggtaacggccatgaaatgctttcttctggagctccaggtcatcagcttggagtctggggacgcaagcatccacgatacggttgaaaacctcatcatccttgcgaacaactctctctcatctaatggaaacgttacagagagtgggtgtaaggagtgcgaagagttggaagaaaaaaacatcaaagaatttcttcaatccttcgttcacatagtgcaaatgttcattaacacgtccactaccacacccgccccgaggccacctacgccggcaccgactatcgccagtcaacccctctctctgcgccccgaggcttgccggcctgcggctggtggggcggtccacacccggggcctggattttgcgtgcgatatatacatctgggcacctcttgccggcacctgcggagtgctgcttctctcactcgttattacgctgtactgctaa

SEQ ID NO: 320 - DNA, 2172 bp, Artificial Sequence
  Synthetic
  misc_feature: NK77.24_CD70_DB02_D02
atggccttaccagtgaccgccttgctcctgccgctggccttgctgctccacgccgccaggccggactacaaagacgatgacgataaaggcggtggtggctctggtggtggcggatcccaggtgcagctggtgcagtctggggctgaggtgaagaagcctggggcctcagtgaaggtttcctgcaaggcatctggatacaccttcaccagctactatatgcactgggtgcgacaggcccctggacaagggcttgagtggatgggaataatcgatccagggagtggtgacacaagctacgcacagaagttccagggcagagtcaccatgaccagggacacgtccacgagcacagtctacatggagctgagcagcctgagatctgaggacacggccgtgtattactgtgctagagggtccaactggtacgactactttgactactggggccaagggaccctggtcaccgtctcctcaggtggaggcggttcaggcggaggtggctctggcggtggcggatcggaaatagtgatgacgcagtctccagccaccctgtctgtgtctccaggggaaagagccaccctctcctgcagggccagtcagagtgttagcagctacttagcctggtaccagcagaaacctggccaggctcccaggctcctcatctatggtgcatccaccagggccactggtatcccagccaggttcagtggcagtgggtctgggacagagttcactctcaccatcagcagcctgcagtctgaagattttgcagtttattactgtcagcagtatgatagctatcctccaactttcggcggagggaccaaggtggagatcaaaaccacgacgccagcgccgcggccaccaacaccggcgcccaccatcgcgtcgcagcccctgtccctgcgcccagaggcgtgccggccagcggcggggggcgcagtgcacacgagggggctggacttcgcctgtgatatctacatctgggcgcccttggccgggacttgtggggtccttctcctgtcactggttatcaccctttactgccggagggaccagaggctgccccccgatgcccacaagccccctgggggaggcagtttccggacccccatccaagaggagcaggccgacgcccactccaccctggccaagatcagagtgaagttcagcaggagcgcagacgcccccgcgtaccagcagggccagaaccagctctataacgagctcaatctaggacgaagagaggagtacgatgttttggacaagagacgtggccgggaccctgagatggggggaaagccgagaaggaagaaccctcaggaaggcctgtacaatgaactgcagaaagataagatggcggaggcctacagtgagattgggatgaaaggcgagcgccggaggggcaaggggcacgatggcctttaccagggtctcagtacagccaccaaggacacctacgacgcccttcacatgcaggccctgccccctcgcggctctggcgagggaaggggttccctgcttacttgcggcgacgtcgaagagaatcccggtccgatggccctcccagtaactgccctccttttgcccctcgcactccttcttcatgccgctcgccccaactgggtcaacgtgattagcgatttgaagaaaatcgaggaccttatacagtctatgcatattgacgctacactgtatactgagagtgatgtacacccgtcctgtaaggtaacggccatgaaatgctttcttctggagctccaggtcatcagcttggagtctggggacgcaagcatccacgatacggttgaaaacctcatcatccttgcgaacaactctctctcatctaatggaaacgttacagagagtgggtgtaaggagtgcgaagagttggaagaaaaaaacatcaaagaatttcttcaatccttcgttcacatagtgcaaatgttcattaacacgtccactaccacacccgccccgaggccacctacgccggcaccgactatcgccagtcaacccctctctctgcgccccgaggcttgccggcctgcggctggtggggcggtccacacccggggcctggattttgcgtgcgatatatacatctgggcacctcttgccggcacctgcggagtgctgcttctctcactcgttattacgctgtactgctaa

SEQ ID NO: 321 - DNA, 2172 bp, Artificial Sequence
  Synthetic
  misc_feature: NK77.25_CD70_DB02_D04
atggccttaccagtgaccgccttgctcctgccgctggccttgctgctccacgccgccaggccggactacaaagacgatgacgataaaggcggtggtggctctggtggtggcggatcccaggtgcagctggtgcagtctggggctgaggtgaagaagcctggggcctcagtgaaggtttcctgcaaggcatctggataccgcctgagcgaccattatatgcactgggtgcgacaggcccctggacaagggcttgagtggatgggaataatcaaccctagtggtgggagcacaacatacgcacagaacttccagggcagagtcaccatgaccagggacacgtccacgagcacagtctacatggagctgagcagcctgagatctgaggacacggccgtgtattactgtgcttccagttactatggtgactacgtcttggtgaattggggccaagggaccctggtcaccgtctcctcaggtggaggcggttcaggcggaggtggctctggcggtggcggatcggacatccagatgacccagtctccatcctccctgtctgcatctgtaggagacagagtcaccatcacttgccaggcaagtcaggacattagcaattatttaaattggtatcagcagaaaccagggaaagcccctaagctcctgatctatgctgcatccaccttggaaagtggggtcccatcaaggttcagtggcagtggatctgggacagatttcactctcaccatcagcagtctgcaacctgaagattttgcaacttactactgtcttcaggattacgactaccctctgacttttggccaggggaccaagctggagatcaaaaccacgacgccagcgccgcggccaccaacaccggcgcccaccatcgcgtcgcagcccctgtccctgcgcccagaggcgtgccggccagcggcggggggcgcagtgcacacgagggggctggacttcgcctgtgatatctacatctgggcgcccttggccgggacttgtggggtccttctcctgtcactggttatcaccctttactgccggagggaccagaggctgccccccgatgcccacaagccccctgggggaggcagtttccggacccccatccaagaggagcaggccgacgcccactccaccctggccaagatcagagtgaagttcagcaggagcgcagacgcccccgcgtaccagcagggccagaaccagctctataacgagctcaatctaggacgaagagaggagtacgatgttttggacaagagacgtggccgggaccctgagatggggggaaagccgagaaggaagaaccctcaggaaggcctgtacaatgaactgcagaaagataagatggcggaggcctacagtgagattgggatgaaaggcgagcgccggaggggcaaggggcacgatggcctttaccagggtctcagtacagccaccaaggacacctacgacgcccttcacatgcaggccctgccccctcgcggctctggcgagggaaggggttccctgcttacttgcggcgacgtcgaagagaatcccggtccgatggccctcccagtaactgccctccttttgcccctcgcactccttcttcatgccgctcgccccaactgggtcaacgtgattagcgatttgaagaaaatcgaggaccttatacagtctatgcatattgacgctacactgtatactgagagtgatgtacacccgtcctgtaaggtaacggccatgaaatgctttcttctggagctccaggtcatcagcttggagtctggggacgcaagcatccacgatacggttgaaaacctcatcatccttgcgaacaactctctctcatctaatggaaacgttacagagagtgggtgtaaggagtgcgaagagttggaagaaaaaaacatcaaagaatttcttcaatccttcgttcacatagtgcaaatgttcattaacacgtccactaccacacccgccccgaggccacctacgccggcaccgactatcgccagtcaacccctctctctgcgccccgaggcttgccggcctgcggctggtggggcggtccacacccggggcctggattttgcgtgcgatatatacatctgggcacctcttgccggcacctgcggagtgctgcttctctcactcgttattacgctgtactgctaa

SEQ ID NO: 322 - DNA, 2175 bp, Artificial Sequence
  Synthetic
  misc_feature: NK77.26_CD70_DB02_D10
atggccttaccagtgaccgccttgctcctgccgctggccttgctgctccacgccgccaggccggactacaaagacgatgacgataaaggcggtggtggctctggtggtggcggatcccaggtgcagctggtgcagtctggggctgaggtgaagaagcctggggcctcagtgaaggtttcctgcaaggcatctggatacaccttcaccgattactatgtccactgggtgcgacaggcccctggacaagggcttgagtggatgggatggatcaacccgaatactggtgggacaagcttcgcacagaatttccagggcagagtcaccatgaccagggacacgtccacgagcacagtctacatggagctgagcagcctgagatctgaggacacggccgtgtattactgtgctagagatctgggtcaatggttgggagagattgactactggggccaagggaccctggtcaccgtctcctcaggtggaggcggttcaggcggaggtggctctggcggtggcggatcggacatccagatgacccagtctccatcttctctctctgcatctgtaggagacagagtcaccatcacttgtcgggcgagtcagacaatttataagtggttagcctggtatcagcagaaaccagggaaagcccctaagctcctgatctatgacgcatccagtttggaaagtggggtcccatcaaggttcagcggcagtggatctgggacagatttcactctcactatcagcagcctgcagcctgaagattttgcaacttactattgtcaacaggctaacagtttccctttcactttcggccctgggaccaaagtggatatcaaaaccacgacgccagcgccgcggccaccaacaccggcgcccaccatcgcgtcgcagcccctgtccctgcgcccagaggcgtgccggccagcggcggggggcgcagtgcacacgagggggctggacttcgcctgtgatatctacatctgggcgcccttggccgggacttgtggggtccttctcctgtcactggttatcaccctttactgccggagggaccagaggctgccccccgatgcccacaagccccctgggggaggcagtttccggacccccatccaagaggagcaggccgacgcccactccaccctggccaagatcagagtgaagttcagcaggagcgcagacgcccccgcgtaccagcagggccagaaccagctctataacgagctcaatctaggacgaagagaggagtacgatgttttggacaagagacgtggccgggaccctgagatggggggaaagccgagaaggaagaaccctcaggaaggcctgtacaatgaactgcagaaagataagatggcggaggcctacagtgagattgggatgaaaggcgagcgccggaggggcaaggggcacgatggcctttaccagggtctcagtacagccaccaaggacacctacgacgcccttcacatgcaggccctgccccctcgcggctctggcgagggaaggggttccctgcttacttgcggcgacgtcgaagagaatcccggtccgatggccctcccagtaactgccctccttttgcccctcgcactccttcttcatgccgctcgccccaactgggtcaacgtgattagcgatttgaagaaaatcgaggaccttatacagtctatgcatattgacgctacactgtatactgagagtgatgtacacccgtcctgtaaggtaacggccatgaaatgctttcttctggagctccaggtcatcagcttggagtctggggacgcaagcatccacgatacggttgaaaacctcatcatccttgcgaacaactctctctcatctaatggaaacgttacagagagtgggtgtaaggagtgcgaagagttggaagaaaaaaacatcaaagaatttcttcaatccttcgttcacatagtgcaaatgttcattaacacgtccactaccacacccgccccgaggccacctacgccggcaccgactatcgccagtcaacccctctctctgcgccccgaggcttgccggcctgcggctggtggggcggtccacacccggggcctggattttgcgtgcgatatatacatctgggcacctcttgccggcacctgcggagtgctgcttctctcactcgttattacgctgtactgctaa

SEQ ID NO: 323 - DNA, 2187 bp, Artificial Sequence
  Synthetic
  misc_feature: NK77.27_CD70_DB02_D11
atggccttaccagtgaccgccttgctcctgccgctggccttgctgctccacgccgccaggccggactacaaagacgatgacgataaaggcggtggtggctctggtggtggcggatcccaggtgcagctggtgcagtctggggctgaggtgaagaagcctggggcctcagtgaaggtttcctgcaaggcatctggatacaccttcaccgactacaccgattactttgtgcactgggtgcgacaggcccctggacaagggcttgagtggatgggaatattcaaccctagtgatggtagcacaagctacgcacaggaattccagggcagagtcaccatgaccagggacacgtccacgagcacagtctacatggagctgagcagcctgagatctgaggacacggccgtgtattactgtgctagaggaccttacagtagtagctggtattactttgactactggggccaagggaccctggtcaccgtctcctcaggtggaggcggttcaggcggaggtggctctggcggtggcggatcggacatccagatgacccagtctccatcctccctgtctgcatctgtaggagacagagtcaccatcacttgccaggcgagtcaggacattagcaactatttaaattggtatcagcagaaaccagggaaagcccctaagctcctgatctacgatgcatccaatttggaaacaggggtcccatcaaggttcagtggaagtggatctgggacagattttactctgaccatcagcagcctgcagcctgaagatttcgcaacatattactgtcaacaggcccactcgtttcctcccacgttcggccaagggaccaaggtggaaatcaaaaccacgacgccagcgccgcggccaccaacaccggcgcccaccatcgcgtcgcagcccctgtccctgcgcccagaggcgtgccggccagcggcggggggcgcagtgcacacgagggggctggacttcgcctgtgatatctacatctgggcgcccttggccgggacttgtggggtccttctcctgtcactggttatcaccctttactgccggagggaccagaggctgccccccgatgcccacaagccccctgggggaggcagtttccggacccccatccaagaggagcaggccgacgcccactccaccctggccaagatcagagtgaagttcagcaggagcgcagacgcccccgcgtaccagcagggccagaaccagctctataacgagctcaatctaggacgaagagaggagtacgatgttttggacaagagacgtggccgggaccctgagatggggggaaagccgagaaggaagaaccctcaggaaggcctgtacaatgaactgcagaaagataagatggcggaggcctacagtgagattgggatgaaaggcgagcgccggaggggcaaggggcacgatggcctttaccagggtctcagtacagccaccaaggacacctacgacgcccttcacatgcaggccctgccccctcgcggctctggcgagggaaggggttccctgcttacttgcggcgacgtcgaagagaatcccggtccgatggccctcccagtaactgccctccttttgcccctcgcactccttcttcatgccgctcgccccaactgggtcaacgtgattagcgatttgaagaaaatcgaggaccttatacagtctatgcatattgacgctacactgtatactgagagtgatgtacacccgtcctgtaaggtaacggccatgaaatgctttcttctggagctccaggtcatcagcttggagtctggggacgcaagcatccacgatacggttgaaaacctcatcatccttgcgaacaactctctctcatctaatggaaacgttacagagagtgggtgtaaggagtgcgaagagttggaagaaaaaaacatcaaagaatttcttcaatccttcgttcacatagtgcaaatgttcattaacacgtccactaccacacccgccccgaggccacctacgccggcaccgactatcgccagtcaacccctctctctgcgccccgaggcttgccggcctgcggctggtggggcggtccacacccggggcctggattttgcgtgcgatatatacatctgggcacctcttgccggcacctgcggagtgctgcttctctcactcgttattacgctgtactgctaa

SEQ ID NO: 324 - DNA, 2175 bp, Artificial Sequence
  Synthetic
  misc_feature: NK77.28_CD70_DB02_E04
atggccttaccagtgaccgccttgctcctgccgctggccttgctgctccacgccgccaggccggactacaaagacgatgacgataaaggcggtggtggctctggtggtggcggatcccaggtgcagctggtgcagtctggggctgaggtgaagaagcctggggcctcagtgaaggtttcctgcaaggcatctggatacatcttcaccgattactatatgcactgggtgcgacaggcccctggacaagggcttgagtggatgggaataatcaaccctagtggtggagatacactttacgcacagaagttccagggcagagtcaccatgaccagggacacgtccacgagcacagtctacatggagctgagcagcctgagatctgaggacacggccgtgtattactgtgctagagaaggcgtaggagctatgggcgtgtttgactactggggccaagggaccctggtcaccgtctcctcaggtggaggcggttcaggcggaggtggctctggcggtggcggatcggacatccagatgacccagtctccatcctccctgtctgcatctgtaggagacagagtcaccatcacttgccgggcaagtaccagcattagcgattatgtgcattggtatcagcagaaaccagggaaagcccctaagctcctgatctatgatgcatccagtttgcaaagtggggtcccatcaaggttcagtggcagtggatctgggacagatttcactctcaccatcagcagtctgcaacctgaagattttgcaacttactactgtcaacagagtgatagtacccctcccactttcggcggagggaccaaggtggagatcaaaaccacgacgccagcgccgcggccaccaacaccggcgcccaccatcgcgtcgcagcccctgtccctgcgcccagaggcgtgccggccagcggcggggggcgcagtgcacacgagggggctggacttcgcctgtgatatctacatctgggcgcccttggccgggacttgtggggtccttctcctgtcactggttatcaccctttactgccggagggaccagaggctgccccccgatgcccacaagccccctgggggaggcagtttccggacccccatccaagaggagcaggccgacgcccactccaccctggccaagatcagagtgaagttcagcaggagcgcagacgcccccgcgtaccagcagggccagaaccagctctataacgagctcaatctaggacgaagagaggagtacgatgttttggacaagagacgtggccgggaccctgagatggggggaaagccgagaaggaagaaccctcaggaaggcctgtacaatgaactgcagaaagataagatggcggaggcctacagtgagattgggatgaaaggcgagcgccggaggggcaaggggcacgatggcctttaccagggtctcagtacagccaccaaggacacctacgacgcccttcacatgcaggccctgccccctcgcggctctggcgagggaaggggttccctgcttacttgcggcgacgtcgaagagaatcccggtccgatggccctcccagtaactgccctccttttgcccctcgcactccttcttcatgccgctcgccccaactgggtcaacgtgattagcgatttgaagaaaatcgaggaccttatacagtctatgcatattgacgctacactgtatactgagagtgatgtacacccgtcctgtaaggtaacggccatgaaatgctttcttctggagctccaggtcatcagcttggagtctggggacgcaagcatccacgatacggttgaaaacctcatcatccttgcgaacaactctctctcatctaatggaaacgttacagagagtgggtgtaaggagtgcgaagagttggaagaaaaaaacatcaaagaatttcttcaatccttcgttcacatagtgcaaatgttcattaacacgtccactaccacacccgccccgaggccacctacgccggcaccgactatcgccagtcaacccctctctctgcgccccgaggcttgccggcctgcggctggtggggcggtccacacccggggcctggattttgcgtgcgatatatacatctgggcacctcttgccggcacctgcggagtgctgcttctctcactcgttattacgctgtactgctaa

SEQ ID NO: 325 - DNA, 2181 bp, Artificial Sequence
  Synthetic
  misc_feature: NK77.29_CD70_DB02_F06
atggccttaccagtgaccgccttgctcctgccgctggccttgctgctccacgccgccaggccggactacaaagacgatgacgataaaggcggtggtggctctggtggtggcggatcccaggtgcagctggtgcagtctggggctgaggtgaagaagcctggggcctcagtgaaggtttcctgcaaggcatctggatacaccttcaccgatcactatatccactgggtgcgacaggcccctggacaagggcttgagtggatgggatggatcagtgcgtacaatggtaaaacaaattacgcacagaagttccagggcagagtcaccatgaccagggacacgtccacgagcacagtctacatggagctgagcagcctgagatctgaggacacggccgtgtattactgtgctagagacacaatctactatgacttttggagtgggtacgactactggggccaagggaccctggtcaccgtctcctcaggtggaggcggttcaggcggaggtggctctggcggtggcggatcggacatccagatgacccagtctccatcctccctgtctgcatctgtaggagacagagtcaccatcacttgccgggcaagtcagggaattagcaataatttaaattggtatcagcagaaaccagggaaagcccctaagctcctgatctattacgcatccaccttgcaaagtggggtcccatcaaggttcagtggcagtggatctgggacagatttcactctcaccatcagcagtctgcaacctgaagattttgcaacttactactgtcaacagagttacagtacccctatcaccttcggccaagggacacgactggagattaaaaccacgacgccagcgccgcggccaccaacaccggcgcccaccatcgcgtcgcagcccctgtccctgcgcccagaggcgtgccggccagcggcggggggcgcagtgcacacgagggggctggacttcgcctgtgatatctacatctgggcgcccttggccgggacttgtggggtccttctcctgtcactggttatcaccctttactgccggagggaccagaggctgccccccgatgcccacaagccccctgggggaggcagtttccggacccccatccaagaggagcaggccgacgcccactccaccctggccaagatcagagtgaagttcagcaggagcgcagacgcccccgcgtaccagcagggccagaaccagctctataacgagctcaatctaggacgaagagaggagtacgatgttttggacaagagacgtggccgggaccctgagatggggggaaagccgagaaggaagaaccctcaggaaggcctgtacaatgaactgcagaaagataagatggcggaggcctacagtgagattgggatgaaaggcgagcgccggaggggcaaggggcacgatggcctttaccagggtctcagtacagccaccaaggacacctacgacgcccttcacatgcaggccctgccccctcgcggctctggcgagggaaggggttccctgcttacttgcggcgacgtcgaagagaatcccggtccgatggccctcccagtaactgccctccttttgcccctcgcactccttcttcatgccgctcgccccaactgggtcaacgtgattagcgatttgaagaaaatcgaggaccttatacagtctatgcatattgacgctacactgtatactgagagtgatgtacacccgtcctgtaaggtaacggccatgaaatgctttcttctggagctccaggtcatcagcttggagtctggggacgcaagcatccacgatacggttgaaaacctcatcatccttgcgaacaactctctctcatctaatggaaacgttacagagagtgggtgtaaggagtgcgaagagttggaagaaaaaaacatcaaagaatttcttcaatccttcgttcacatagtgcaaatgttcattaacacgtccactaccacacccgccccgaggccacctacgccggcaccgactatcgccagtcaacccctctctctgcgccccgaggcttgccggcctgcggctggtggggcggtccacacccggggcctggattttgcgtgcgatatatacatctgggcacctcttgccggcacctgcggagtgctgcttctctcactcgttattacgctgtactgctaa

SEQ ID NO: 326 - DNA, 2181 bp, Artificial Sequence
  Synthetic
  misc_feature: NK77.31_CD70_DB02_F08
atggccttaccagtgaccgccttgctcctgccgctggccttgctgctccacgccgccaggccggactacaaagacgatgacgataaaggcggtggtggctctggtggtggcggatcccaggtgcagctggtgcagtctggggctgaggtgaagaagcctggggcctcagtgaaggtttcctgcaaggcatctggatacaccttcaccagctactatatgcactgggtgcgacaggcccctggacaagggcttgagtggatgggaataatcaaccctagtggtggcgcgacaatctacgcacagaagttccagggcagagtcaccatgaccagggacacgtccacgagcacagtctacatggagctgagcagcctgagatctgaggacacggccgtgtattactgtgctagatctcgcggtgactactatggaagcggggattttgactactggggccaagggaccctggtcaccgtctcctcaggtggaggcggttcaggcggaggtggctctggcggtggcggatcggacatccagatgacccagtctccatcctccctgtctgcatctgtaggagacagagtcaccatcacttgccgggcaagtcagacgattagcaattatttaaattggtatcagcagaaaccagggaaagcccctaagctcctgatctatgatgcatccacgttggaagccggggtcccatcaaggttcagtggcagtggatctgggacagatttcactctcaccatcagcagtctgcaacctgaagattttgcaacttactactgtcaacagagttacaaccctccatacacttttggccaggggaccaagctggagatcaaaaccacgacgccagcgccgcggccaccaacaccggcgcccaccatcgcgtcgcagcccctgtccctgcgcccagaggcgtgccggccagcggcggggggcgcagtgcacacgagggggctggacttcgcctgtgatatctacatctgggcgcccttggccgggacttgtggggtccttctcctgtcactggttatcaccctttactgccggagggaccagaggctgccccccgatgcccacaagccccctgggggaggcagtttccggacccccatccaagaggagcaggccgacgcccactccaccctggccaagatcagagtgaagttcagcaggagcgcagacgcccccgcgtaccagcagggccagaaccagctctataacgagctcaatctaggacgaagagaggagtacgatgttttggacaagagacgtggccgggaccctgagatggggggaaagccgagaaggaagaaccctcaggaaggcctgtacaatgaactgcagaaagataagatggcggaggcctacagtgagattgggatgaaaggcgagcgccggaggggcaaggggcacgatggcctttaccagggtctcagtacagccaccaaggacacctacgacgcccttcacatgcaggccctgccccctcgcggctctggcgagggaaggggttccctgcttacttgcggcgacgtcgaagagaatcccggtccgatggccctcccagtaactgccctccttttgcccctcgcactccttcttcatgccgctcgccccaactgggtcaacgtgattagcgatttgaagaaaatcgaggaccttatacagtctatgcatattgacgctacactgtatactgagagtgatgtacacccgtcctgtaaggtaacggccatgaaatgctttcttctggagctccaggtcatcagcttggagtctggggacgcaagcatccacgatacggttgaaaacctcatcatccttgcgaacaactctctctcatctaatggaaacgttacagagagtgggtgtaaggagtgcgaagagttggaagaaaaaaacatcaaagaatttcttcaatccttcgttcacatagtgcaaatgttcattaacacgtccactaccacacccgccccgaggccacctacgccggcaccgactatcgccagtcaacccctctctctgcgccccgaggcttgccggcctgcggctggtggggcggtccacacccggggcctggattttgcgtgcgatatatacatctgggcacctcttgccggcacctgcggagtgctgcttctctcactcgttattacgctgtactgctaa

SEQ ID NO: 327 - DNA, 2169 bp, Artificial Sequence
  Synthetic
  misc_feature: NK77.32_CD70_DB02_G07
atggccttaccagtgaccgccttgctcctgccgctggccttgctgctccacgccgccaggccggactacaaagacgatgacgataaaggcggtggtggctctggtggtggcggatcccaggtgcagctggtgcagtctggggctgaggtgaagaagcctggggcctcagtgaaggtttcctgcaaggcatctggatacaccttcaccgattactatatgcactgggtgcgacaggcccctggacaagggcttgagtggatgggaataatcaaccctagtggtggaagcacaagctacgcacagaagttccagggcagagtcaccatgaccagggacacgtccacgagcacagtctacatggagctgagcagcctgagatctgaggacacggccgtgtattactgtgctagaggatattttgatcacgcattcgatatctggggccaagggacaatggtcaccgtctcttcaggtggaggcggttcaggcggaggtggctctggcggtggcggatcggacatccagatgacccagtctccatcctccctgtctgcatctgtaggagacagagtcaccatcacttgccgggcaagtcagagcattagcacttatttaaattggtatcagcagaaaccagggaaagcccctaagctcctgatctatgatgcatccaacttggagatcggggtcccatcaaggttcagtggcagtggatctgggacagatttcactctcaccatcagcagtctgcaacctgaagattttgcaacttactactgtcaacagagtgacagttcaccactcactttcggccaggggaccaaggtggagatcaaaaccacgacgccagcgccgcggccaccaacaccggcgcccaccatcgcgtcgcagcccctgtccctgcgcccagaggcgtgccggccagcggcggggggcgcagtgcacacgagggggctggacttcgcctgtgatatctacatctgggcgcccttggccgggacttgtggggtccttctcctgtcactggttatcaccctttactgccggagggaccagaggctgccccccgatgcccacaagccccctgggggaggcagtttccggacccccatccaagaggagcaggccgacgcccactccaccctggccaagatcagagtgaagttcagcaggagcgcagacgcccccgcgtaccagcagggccagaaccagctctataacgagctcaatctaggacgaagagaggagtacgatgttttggacaagagacgtggccgggaccctgagatggggggaaagccgagaaggaagaaccctcaggaaggcctgtacaatgaactgcagaaagataagatggcggaggcctacagtgagattgggatgaaaggcgagcgccggaggggcaaggggcacgatggcctttaccagggtctcagtacagccaccaaggacacctacgacgcccttcacatgcaggccctgccccctcgcggctctggcgagggaaggggttccctgcttacttgcggcgacgtcgaagagaatcccggtccgatggccctcccagtaactgccctccttttgcccctcgcactccttcttcatgccgctcgccccaactgggtcaacgtgattagcgatttgaagaaaatcgaggaccttatacagtctatgcatattgacgctacactgtatactgagagtgatgtacacccgtcctgtaaggtaacggccatgaaatgctttcttctggagctccaggtcatcagcttggagtctggggacgcaagcatccacgatacggttgaaaacctcatcatccttgcgaacaactctctctcatctaatggaaacgttacagagagtgggtgtaaggagtgcgaagagttggaagaaaaaaacatcaaagaatttcttcaatccttcgttcacatagtgcaaatgttcattaacacgtccactaccacacccgccccgaggccacctacgccggcaccgactatcgccagtcaacccctctctctgcgccccgaggcttgccggcctgcggctggtggggcggtccacacccggggcctggattttgcgtgcgatatatacatctgggcacctcttgccggcacctgcggagtgctgcttctctcactcgttattacgctgtactgctaa

SEQ ID NO: 328 - DNA, 2187 bp, Artificial Sequence
  Synthetic
  misc_feature: NK77.33_CD70_DB02_H04
atggccttaccagtgaccgccttgctcctgccgctggccttgctgctccacgccgccaggccggactacaaagacgatgacgataaaggcggtggtggctctggtggtggcggatcccaggtgcagctggtgcagtctggggctgaggtgaagaagcctggggcctcagtgaaggtttcctgcaaggcatctggatacaccttcaccggttactatatgcactgggtgcgacaggcccctggacaagggcttgagtggatgggaataatcaaccctagtggtggggatacaatatacgcacagaagttccagggcagagtcaccatgaccagggacacgtccacgagcacagtctacatggagctgagcagcctgagatctgaggacacggccgtgtattactgtgctagaggtgactcgtcttcatggtacgactattactactacatggacgtctggggcaaagggaccacggtcaccgtctcctcaggtggaggcggttcaggcggaggtggctctggcggtggcggatcggacatccagatgacccagtctccatcctccctgtctgcatctgtaggagacagagtcaccatcacttgccaagcaagtcaggatattagcaactatttaaattggtatcagcagaaaccagggaaagcccctaagctcctgatctatgctgcatccagtttgcaaagtggggtcccatcaaggttcagtggcagtggatctgggacagatttcactctcaccatcagcagtctgcaacctgaagattttgcaacttactactgtcaacagagttaccggacccctctcactttcggcggagggaccaaggtggagatcaaaaccacgacgccagcgccgcggccaccaacaccggcgcccaccatcgcgtcgcagcccctgtccctgcgcccagaggcgtgccggccagcggcggggggcgcagtgcacacgagggggctggacttcgcctgtgatatctacatctgggcgcccttggccgggacttgtggggtccttctcctgtcactggttatcaccctttactgccggagggaccagaggctgccccccgatgcccacaagccccctgggggaggcagtttccggacccccatccaagaggagcaggccgacgcccactccaccctggccaagatcagagtgaagttcagcaggagcgcagacgcccccgcgtaccagcagggccagaaccagctctataacgagctcaatctaggacgaagagaggagtacgatgttttggacaagagacgtggccgggaccctgagatggggggaaagccgagaaggaagaaccctcaggaaggcctgtacaatgaactgcagaaagataagatggcggaggcctacagtgagattgggatgaaaggcgagcgccggaggggcaaggggcacgatggcctttaccagggtctcagtacagccaccaaggacacctacgacgcccttcacatgcaggccctgccccctcgcggctctggcgagggaaggggttccctgcttacttgcggcgacgtcgaagagaatcccggtccgatggccctcccagtaactgccctccttttgcccctcgcactccttcttcatgccgctcgccccaactgggtcaacgtgattagcgatttgaagaaaatcgaggaccttatacagtctatgcatattgacgctacactgtatactgagagtgatgtacacccgtcctgtaaggtaacggccatgaaatgctttcttctggagctccaggtcatcagcttggagtctggggacgcaagcatccacgatacggttgaaaacctcatcatccttgcgaacaactctctctcatctaatggaaacgttacagagagtgggtgtaaggagtgcgaagagttggaagaaaaaaacatcaaagaatttcttcaatccttcgttcacatagtgcaaatgttcattaacacgtccactaccacacccgccccgaggccacctacgccggcaccgactatcgccagtcaacccctctctctgcgccccgaggcttgccggcctgcggctggtggggcggtccacacccggggcctggattttgcgtgcgatatatacatctgggcacctcttgccggcacctgcggagtgctgcttctctcactcgttattacgctgtactgctaa

SEQ ID NO: 329 - DNA, 2172 bp, Artificial Sequence
  Synthetic
  misc_feature: NK77.34_CD70_DB02_H05
atggccttaccagtgaccgccttgctcctgccgctggccttgctgctccacgccgccaggccggactacaaagacgatgacgataaaggcggtggtggctctggtggtggcggatcccaggtgcagctggtgcagtctggggctgaggtgaagaagcctggggcctcagtgaaggtttcctgcaaggcatctggatacaccttcaccgactactttacccactgggtgcgacaggcccctggacaagggcttgagtggatgggatggatcaacacatatgacggtaatacaaattacgcacagaagttccagggcagagtcaccatgaccagggacacgtccacgagcacagtctacatggagctgagcagcctgagatctgaggacacggccgtgtattactgtgctagagaaatggagtggctcggccaggtggactactggggccaagggaccctggtcaccgtctcctcaggtggaggcggttcaggcggaggtggctctggcggtggcggatcggacatccagatgacccagtctccatcctccctgtctgcatctgtaggagacagagtcaccatcacttgccgggcaagtcaggatattcgcaacgatttagggtggtatcagcagaaaccagggaaagcccctaagctcctgatctatgctgcatccaacttggagaccggggtcccatcaaggttcagtggcagtggatctgggacagatttcactctcaccatcagcagtctgcaacctgaagattttgcaacttactactgtcaacagagttacagtgcacctttcactttcggccctgggaccaaagtggatatcaaaaccacgacgccagcgccgcggccaccaacaccggcgcccaccatcgcgtcgcagcccctgtccctgcgcccagaggcgtgccggccagcggcggggggcgcagtgcacacgagggggctggacttcgcctgtgatatctacatctgggcgcccttggccgggacttgtggggtccttctcctgtcactggttatcaccctttactgccggagggaccagaggctgccccccgatgcccacaagccccctgggggaggcagtttccggacccccatccaagaggagcaggccgacgcccactccaccctggccaagatcagagtgaagttcagcaggagcgcagacgcccccgcgtaccagcagggccagaaccagctctataacgagctcaatctaggacgaagagaggagtacgatgttttggacaagagacgtggccgggaccctgagatggggggaaagccgagaaggaagaaccctcaggaaggcctgtacaatgaactgcagaaagataagatggcggaggcctacagtgagattgggatgaaaggcgagcgccggaggggcaaggggcacgatggcctttaccagggtctcagtacagccaccaaggacacctacgacgcccttcacatgcaggccctgccccctcgcggctctggcgagggaaggggttccctgcttacttgcggcgacgtcgaagagaatcccggtccgatggccctcccagtaactgccctccttttgcccctcgcactccttcttcatgccgctcgccccaactgggtcaacgtgattagcgatttgaagaaaatcgaggaccttatacagtctatgcatattgacgctacactgtatactgagagtgatgtacacccgtcctgtaaggtaacggccatgaaatgctttcttctggagctccaggtcatcagcttggagtctggggacgcaagcatccacgatacggttgaaaacctcatcatccttgcgaacaactctctctcatctaatggaaacgttacagagagtgggtgtaaggagtgcgaagagttggaagaaaaaaacatcaaagaatttcttcaatccttcgttcacatagtgcaaatgttcattaacacgtccactaccacacccgccccgaggccacctacgccggcaccgactatcgccagtcaacccctctctctgcgccccgaggcttgccggcctgcggctggtggggcggtccacacccggggcctggattttgcgtgcgatatatacatctgggcacctcttgccggcacctgcggagtgctgcttctctcactcgttattacgctgtactgctaa

SEQ ID NO: 330 - DNA, 2172 bp, Artificial Sequence
  Synthetic
  misc_feature: NK77.35_CD70_DB02_H08
atggccttaccagtgaccgccttgctcctgccgctggccttgctgctccacgccgccaggccggactacaaagacgatgacgataaaggcggtggtggctctggtggtggcggatcccaggtgcagctggtgcagtctggggctgaggtgaagaagcctggggcctcagtgaaggtttcctgcaaggcatctggatacaccttcaccagctactatatacactgggtgcgacaggcccctggacaagggcttgagtggatgggacgaatcaaccctaatggtggagggacaaactacgcacagaagttccagggcagagtcaccatgaccagggacacgtccacgagcacagtctacatggagctgagcagcctgagatctgaggacacggccgtgtattactgtgctagaggccacagagggggtggcgggattgactactggggccaagggaccctggtcaccgtctcctcaggtggaggcggttcaggcggaggtggctctggcggtggcggatcggacatccagatgacccagtctccatcctccctgtctgcatctgtaggagacagagtcaccatcacttgccgggcaagtcaggagattagcaactatttagcctggtatcagcagaaaccagggaaagcccctaagctcctgatctatgatgcatccaacttgcaaactggggtcccatcaaggttcagtggcagtggatctgggacagatttcactctcaccatcagcagtctgcaacctgaagattttgcaacttactactgtcaacagagttacagtacccctttcactttcggccctgggaccaaagtggatatcaaaaccacgacgccagcgccgcggccaccaacaccggcgcccaccatcgcgtcgcagcccctgtccctgcgcccagaggcgtgccggccagcggcggggggcgcagtgcacacgagggggctggacttcgcctgtgatatctacatctgggcgcccttggccgggacttgtggggtccttctcctgtcactggttatcaccctttactgccggagggaccagaggctgccccccgatgcccacaagccccctgggggaggcagtttccggacccccatccaagaggagcaggccgacgcccactccaccctggccaagatcagagtgaagttcagcaggagcgcagacgcccccgcgtaccagcagggccagaaccagctctataacgagctcaatctaggacgaagagaggagtacgatgttttggacaagagacgtggccgggaccctgagatggggggaaagccgagaaggaagaaccctcaggaaggcctgtacaatgaactgcagaaagataagatggcggaggcctacagtgagattgggatgaaaggcgagcgccggaggggcaaggggcacgatggcctttaccagggtctcagtacagccaccaaggacacctacgacgcccttcacatgcaggccctgccccctcgcggctctggcgagggaaggggttccctgcttacttgcggcgacgtcgaagagaatcccggtccgatggccctcccagtaactgccctccttttgcccctcgcactccttcttcatgccgctcgccccaactgggtcaacgtgattagcgatttgaagaaaatcgaggaccttatacagtctatgcatattgacgctacactgtatactgagagtgatgtacacccgtcctgtaaggtaacggccatgaaatgctttcttctggagctccaggtcatcagcttggagtctggggacgcaagcatccacgatacggttgaaaacctcatcatccttgcgaacaactctctctcatctaatggaaacgttacagagagtgggtgtaaggagtgcgaagagttggaagaaaaaaacatcaaagaatttcttcaatccttcgttcacatagtgcaaatgttcattaacacgtccactaccacacccgccccgaggccacctacgccggcaccgactatcgccagtcaacccctctctctgcgccccgaggcttgccggcctgcggctggtggggcggtccacacccggggcctggattttgcgtgcgatatatacatctgggcacctcttgccggcacctgcggagtgctgcttctctcactcgttattacgctgtactgctaa

SEQ ID NO: 331 - DNA, 2172 bp, Artificial Sequence
  Synthetic
  misc_feature: NK77.36_CD70_DB03_A06
atggccttaccagtgaccgccttgctcctgccgctggccttgctgctccacgccgccaggccggactacaaagacgatgacgataaaggcggtggtggctctggtggtggcggatcccaggtgcagctggtgcagtctggggctgaggtgaagaagcctggggcctcagtgaaggtttcctgcaaggcatctggaggtaccttcagtagctacgcaatttcatgggtgcgacaggcccctggacaagggcttgagtggatgggatggatctctcccaacagtggtgacacacactacgcacagaagttccagggcagagtcaccatgaccagggacacgtccacgagcacagtctacatggagctgagcagcctgagatctgaggacacggccgtgtattactgtgctagagactgggggtcaggctggtacgtggactactggggccaagggaccctggtcaccgtctcctcaggtggaggcggttcaggcggaggtggctctggcggtggcggatcggacatccagatgacccagtctccatcctccctgtctgcatctgtaggagacagagtcaccatcacttgccaggcaagtcaggacattagcgattctttaaattggtatcagcagaaaccagggaaagcccctaagctcctgatctattccgcatccagtttgcaaagtggggtcccatcaaggttcagtggcagtggatctgggacagatttcactctcaccatcagcagtctgcaacctgaagattttgcaacttactactgtcaacagagttttacaaccccttatacgttcggccaagggaccaaggtggaaatcaaaaccacgacgccagcgccgcggccaccaacaccggcgcccaccatcgcgtcgcagcccctgtccctgcgcccagaggcgtgccggccagcggcggggggcgcagtgcacacgagggggctggacttcgcctgtgatatctacatctgggcgcccttggccgggacttgtggggtccttctcctgtcactggttatcaccctttactgccggagggaccagaggctgccccccgatgcccacaagccccctgggggaggcagtttccggacccccatccaagaggagcaggccgacgcccactccaccctggccaagatcagagtgaagttcagcaggagcgcagacgcccccgcgtaccagcagggccagaaccagctctataacgagctcaatctaggacgaagagaggagtacgatgttttggacaagagacgtggccgggaccctgagatggggggaaagccgagaaggaagaaccctcaggaaggcctgtacaatgaactgcagaaagataagatggcggaggcctacagtgagattgggatgaaaggcgagcgccggaggggcaaggggcacgatggcctttaccagggtctcagtacagccaccaaggacacctacgacgcccttcacatgcaggccctgccccctcgcggctctggcgagggaaggggttccctgcttacttgcggcgacgtcgaagagaatcccggtccgatggccctcccagtaactgccctccttttgcccctcgcactccttcttcatgccgctcgccccaactgggtcaacgtgattagcgatttgaagaaaatcgaggaccttatacagtctatgcatattgacgctacactgtatactgagagtgatgtacacccgtcctgtaaggtaacggccatgaaatgctttcttctggagctccaggtcatcagcttggagtctggggacgcaagcatccacgatacggttgaaaacctcatcatccttgcgaacaactctctctcatctaatggaaacgttacagagagtgggtgtaaggagtgcgaagagttggaagaaaaaaacatcaaagaatttcttcaatccttcgttcacatagtgcaaatgttcattaacacgtccactaccacacccgccccgaggccacctacgccggcaccgactatcgccagtcaacccctctctctgcgccccgaggcttgccggcctgcggctggtggggcggtccacacccggggcctggattttgcgtgcgatatatacatctgggcacctcttgccggcacctgcggagtgctgcttctctcactcgttattacgctgtactgctaa

SEQ ID NO: 332 - DNA, 2172 bp, Artificial Sequence
  Synthetic
  misc_feature: NK77.37_CD70_DB03_A07
atggccttaccagtgaccgccttgctcctgccgctggccttgctgctccacgccgccaggccggactacaaagacgatgacgataaaggcggtggtggctctggtggtggcggatcccaggtgcagctggtgcagtctggggctgaggtgaagaagcctgggtcctcggtgaaggtctcctgcaaggcttctggaggcaccttcaatagctatggaatcagctgggtgcgacaggcccctggacaagggcttgagtggatgggaggtatcatccctatctttggtacagcaaactacgcacagaagttccagggcagagtcacgattaccgcggacgaatccacgagcacagcctacatggagctgagcagcctgagatctgaggacacggccgtgtattactgtgcgagagatacctacggggatgacgcttttgatatctggggccaagggacaatggtcaccgtctcttcaggtggaggcggttcaggcggaggtggctctggcggtggcggatcggacatccagatgacccagtctccatcttctctgtctgcatctgtaggagacagagtcaccatcacttgtcgggcgagtcagtctattagcagctggttagcctggtatcagcagaaaccagggaaagcccctaagctcctgatctatgatgcatccaatttggaaacaggggtcccatcaaggttcagcggcagtggatctgggacagatttcactctcactatcagcagcctgcagcctgaagattttgcaacttactattgtcaacagaatttcagtcctcctctcaccttcggccaagggacacgactggagattaaaaccacgacgccagcgccgcggccaccaacaccggcgcccaccatcgcgtcgcagcccctgtccctgcgcccagaggcgtgccggccagcggcggggggcgcagtgcacacgagggggctggacttcgcctgtgatatctacatctgggcgcccttggccgggacttgtggggtccttctcctgtcactggttatcaccctttactgccggagggaccagaggctgccccccgatgcccacaagccccctgggggaggcagtttccggacccccatccaagaggagcaggccgacgcccactccaccctggccaagatcagagtgaagttcagcaggagcgcagacgcccccgcgtaccagcagggccagaaccagctctataacgagctcaatctaggacgaagagaggagtacgatgttttggacaagagacgtggccgggaccctgagatggggggaaagccgagaaggaagaaccctcaggaaggcctgtacaatgaactgcagaaagataagatggcggaggcctacagtgagattgggatgaaaggcgagcgccggaggggcaaggggcacgatggcctttaccagggtctcagtacagccaccaaggacacctacgacgcccttcacatgcaggccctgccccctcgcggctctggcgagggaaggggttccctgcttacttgcggcgacgtcgaagagaatcccggtccgatggccctcccagtaactgccctccttttgcccctcgcactccttcttcatgccgctcgccccaactgggtcaacgtgattagcgatttgaagaaaatcgaggaccttatacagtctatgcatattgacgctacactgtatactgagagtgatgtacacccgtcctgtaaggtaacggccatgaaatgctttcttctggagctccaggtcatcagcttggagtctggggacgcaagcatccacgatacggttgaaaacctcatcatccttgcgaacaactctctctcatctaatggaaacgttacagagagtgggtgtaaggagtgcgaagagttggaagaaaaaaacatcaaagaatttcttcaatccttcgttcacatagtgcaaatgttcattaacacgtccactaccacacccgccccgaggccacctacgccggcaccgactatcgccagtcaacccctctctctgcgccccgaggcttgccggcctgcggctggtggggcggtccacacccggggcctggattttgcgtgcgatatatacatctgggcacctcttgccggcacctgcggagtgctgcttctctcactcgttattacgctgtactgctaa

SEQ ID NO: 333 - DNA, 2187 bp, Artificial Sequence
  Synthetic
  misc_feature: NK77.38_CD70_DB03_A08
atggccttaccagtgaccgccttgctcctgccgctggccttgctgctccacgccgccaggccggactacaaagacgatgacgataaaggcggtggtggctctggtggtggcggatcccaggtgcagctggtgcagtctggggctgaggtgaagaagcctggggcctcagtgaaggtttcctgcaaggcatctggatacagtttcaccagctactatatgcactgggtgcgacaggcccctggacaagggcttgagtggatgggaataatcaaccctagtggtgggactacaagctacgcacagaagttccagggcagagtcaccatgaccagggacacgtccacgagcacagtctacatggagctgagcagcctgagatctgaggacacggccgtgtattactgtgctagagacaattccccgtatagctcaagctggtgggactactttgactactggggccaagggaccctggtcaccgtctcctcaggtggaggcggttcaggcggaggtggctctggcggtggcggatcggacatccagatgacccagtctccatcctccctgtctgcatctgtaggagacagagtcaccatcacttgccgggcaagtcaggacattcggcattatttagcatggtatcagcagaaaccagggaaagcccctaagctcctgatctatgacgcatccagtttgcaaagtggggtcccatcaaggttcagtggcagtggatctgggacagatttcactctcaccatcagcagtctgcaacctgaagattttgcaacttactactgtcaacagacctacgacgcacctatcaccttcggccaagggacacgactggagattaaaaccacgacgccagcgccgcggccaccaacaccggcgcccaccatcgcgtcgcagcccctgtccctgcgcccagaggcgtgccggccagcggcggggggcgcagtgcacacgagggggctggacttcgcctgtgatatctacatctgggcgcccttggccgggacttgtggggtccttctcctgtcactggttatcaccctttactgccggagggaccagaggctgccccccgatgcccacaagccccctgggggaggcagtttccggacccccatccaagaggagcaggccgacgcccactccaccctggccaagatcagagtgaagttcagcaggagcgcagacgcccccgcgtaccagcagggccagaaccagctctataacgagctcaatctaggacgaagagaggagtacgatgttttggacaagagacgtggccgggaccctgagatggggggaaagccgagaaggaagaaccctcaggaaggcctgtacaatgaactgcagaaagataagatggcggaggcctacagtgagattgggatgaaaggcgagcgccggaggggcaaggggcacgatggcctttaccagggtctcagtacagccaccaaggacacctacgacgcccttcacatgcaggccctgccccctcgcggctctggcgagggaaggggttccctgcttacttgcggcgacgtcgaagagaatcccggtccgatggccctcccagtaactgccctccttttgcccctcgcactccttcttcatgccgctcgccccaactgggtcaacgtgattagcgatttgaagaaaatcgaggaccttatacagtctatgcatattgacgctacactgtatactgagagtgatgtacacccgtcctgtaaggtaacggccatgaaatgctttcttctggagctccaggtcatcagcttggagtctggggacgcaagcatccacgatacggttgaaaacctcatcatccttgcgaacaactctctctcatctaatggaaacgttacagagagtgggtgtaaggagtgcgaagagttggaagaaaaaaacatcaaagaatttcttcaatccttcgttcacatagtgcaaatgttcattaacacgtccactaccacacccgccccgaggccacctacgccggcaccgactatcgccagtcaacccctctctctgcgccccgaggcttgccggcctgcggctggtggggcggtccacacccggggcctggattttgcgtgcgatatatacatctgggcacctcttgccggcacctgcggagtgctgcttctctcactcgttattacgctgtactgctaa

SEQ ID NO: 334 - DNA, 2181 bp, Artificial Sequence
  Synthetic
  misc_feature: NK77.39_CD70_DB03_A09
atggccttaccagtgaccgccttgctcctgccgctggccttgctgctccacgccgccaggccggactacaaagacgatgacgataaaggcggtggtggctctggtggtggcggatcccaggtgcagctggtgcagtctggggctgaggtgaagaagcctggggcctcagtgaaggtttcctgcaaggcatctggatacaccttcaccgattactatattcactgggtgcgacaggcccctggacaagggcttgagtggatgggatggatcaccccgaacagtggttatacatattacgcacagaatttccagggcagagtcaccatgaccagggacacgtccacgagcacagtctacatggagctgagcagcctgagatctgaggacacggccgtgtattactgtgctagaaacacagactgttatggggacttcctggggctggatgtctggggccaagggacaacggtcaccgtctcttcaggtggaggcggttcaggcggaggtggctctggcggtggcggatcggacatcgtgatgacccagtctccagactccctggctgtgtctctgggcgagagggccaccatcaactgccgggccagctctagtatttccaactacttagcttggtaccagcagaaaccaggacagcctcctaagctgctcatttacggcgcatctacccgggcttccggggtccctgaccgattcagtggcagcgggtctgggacagatttcactctcaccatcagcagcctgcaggctgaagatgtggcagtttattactgtcagcaaagctatagtactcctctcactttcggccaggggaccaaggtggagatcaaaaccacgacgccagcgccgcggccaccaacaccggcgcccaccatcgcgtcgcagcccctgtccctgcgcccagaggcgtgccggccagcggcggggggcgcagtgcacacgagggggctggacttcgcctgtgatatctacatctgggcgcccttggccgggacttgtggggtccttctcctgtcactggttatcaccctttactgccggagggaccagaggctgccccccgatgcccacaagccccctgggggaggcagtttccggacccccatccaagaggagcaggccgacgcccactccaccctggccaagatcagagtgaagttcagcaggagcgcagacgcccccgcgtaccagcagggccagaaccagctctataacgagctcaatctaggacgaagagaggagtacgatgttttggacaagagacgtggccgggaccctgagatggggggaaagccgagaaggaagaaccctcaggaaggcctgtacaatgaactgcagaaagataagatggcggaggcctacagtgagattgggatgaaaggcgagcgccggaggggcaaggggcacgatggcctttaccagggtctcagtacagccaccaaggacacctacgacgcccttcacatgcaggccctgccccctcgcggctctggcgagggaaggggttccctgcttacttgcggcgacgtcgaagagaatcccggtccgatggccctcccagtaactgccctccttttgcccctcgcactccttcttcatgccgctcgccccaactgggtcaacgtgattagcgatttgaagaaaatcgaggaccttatacagtctatgcatattgacgctacactgtatactgagagtgatgtacacccgtcctgtaaggtaacggccatgaaatgctttcttctggagctccaggtcatcagcttggagtctggggacgcaagcatccacgatacggttgaaaacctcatcatccttgcgaacaactctctctcatctaatggaaacgttacagagagtgggtgtaaggagtgcgaagagttggaagaaaaaaacatcaaagaatttcttcaatccttcgttcacatagtgcaaatgttcattaacacgtccactaccacacccgccccgaggccacctacgccggcaccgactatcgccagtcaacccctctctctgcgccccgaggcttgccggcctgcggctggtggggcggtccacacccggggcctggattttgcgtgcgatatatacatctgggcacctcttgccggcacctgcggagtgctgcttctctcactcgttattacgctgtactgctaa

SEQ ID NO: 335 - DNA, 2181 bp, Artificial Sequence
  Synthetic
  misc_feature: NK77.40_CD70_DB03_A11
atggccttaccagtgaccgccttgctcctgccgctggccttgctgctccacgccgccaggccggactacaaagacgatgacgataaaggcggtggtggctctggtggtggcggatcccaggtgcagctggtgcagtctggggctgaggtgaagaagcctggggcctcagtgaaggtttcctgcaaggcatctggatacaccttcaacggctaccttatgcactgggtgcgacaggcccctggacaagggcttgagtggatgggaatagttaacccttccgatggtagcacaggctacgcacagaagttccagggcagagtcaccatgaccagggacacgtccacgagcacagtctacatggagctgagcagcctgagatctgaggacacggccgtgtattactgtgcgaaggacacaggactccgctactttgactggctacttgactactggggccaagggaccctggtcaccgtctcctcaggtggaggcggttcaggcggaggtggctctggcggtggcggatcggacatccagatgacccagtctccatcctccctgtctgcatctgtaggagacagagtcaccatcacttgccgggcgagtcagggcattaccaattttttagcctggtatcagcagaaaccagggaaagcccctaagctcctgatatatgatgcatccaacttggaaaccggggtcccatccaggttcagtggcagtggatctgggacggatttcactctcaccatcagcagcctgcagcctgaagattttgcaacttattactgtcaacagagctatggggcccctcttaccttcggccaagggacacgactggagattaaaaccacgacgccagcgccgcggccaccaacaccggcgcccaccatcgcgtcgcagcccctgtccctgcgcccagaggcgtgccggccagcggcggggggcgcagtgcacacgagggggctggacttcgcctgtgatatctacatctgggcgcccttggccgggacttgtggggtccttctcctgtcactggttatcaccctttactgccggagggaccagaggctgccccccgatgcccacaagccccctgggggaggcagtttccggacccccatccaagaggagcaggccgacgcccactccaccctggccaagatcagagtgaagttcagcaggagcgcagacgcccccgcgtaccagcagggccagaaccagctctataacgagctcaatctaggacgaagagaggagtacgatgttttggacaagagacgtggccgggaccctgagatggggggaaagccgagaaggaagaaccctcaggaaggcctgtacaatgaactgcagaaagataagatggcggaggcctacagtgagattgggatgaaaggcgagcgccggaggggcaaggggcacgatggcctttaccagggtctcagtacagccaccaaggacacctacgacgcccttcacatgcaggccctgccccctcgcggctctggcgagggaaggggttccctgcttacttgcggcgacgtcgaagagaatcccggtccgatggccctcccagtaactgccctccttttgcccctcgcactccttcttcatgccgctcgccccaactgggtcaacgtgattagcgatttgaagaaaatcgaggaccttatacagtctatgcatattgacgctacactgtatactgagagtgatgtacacccgtcctgtaaggtaacggccatgaaatgctttcttctggagctccaggtcatcagcttggagtctggggacgcaagcatccacgatacggttgaaaacctcatcatccttgcgaacaactctctctcatctaatggaaacgttacagagagtgggtgtaaggagtgcgaagagttggaagaaaaaaacatcaaagaatttcttcaatccttcgttcacatagtgcaaatgttcattaacacgtccactaccacacccgccccgaggccacctacgccggcaccgactatcgccagtcaacccctctctctgcgccccgaggcttgccggcctgcggctggtggggcggtccacacccggggcctggattttgcgtgcgatatatacatctgggcacctcttgccggcacctgcggagtgctgcttctctcactcgttattacgctgtactgctaa

SEQ ID NO: 336 - DNA, 2169 bp, Artificial Sequence
  Synthetic
  misc_feature: NK77.41_CD70_DB03_A12
atggccttaccagtgaccgccttgctcctgccgctggccttgctgctccacgccgccaggccggactacaaagacgatgacgataaaggcggtggtggctctggtggtggcggatcccaggtgcagctggtgcagtctggggctgaggtgaagaagcctggggcctcagtgaaggtttcctgcaaggcatctggatacaccttcaccagctactatatgcactgggtgcgacaggcccctggacaagggcttgagtggatgggaataatcgatcctagtggtggccgaacaatttacgcacagcgcttccagggcagagtcaccatgaccagggacacgtccacgagcacagtctacatggagctgagcagcctgagatctgaggacacggccgtgtattactgtgctagacacgaagcaggcggaatctttgactactggggccaagggaccctggtcaccgtctcctcaggtggaggcggttcaggcggaggtggctctggcggtggcggatcggacatccagatgacccagtctccatcctccctgtctgcatctgtaggagacagagtcaccatcacttgccaagcaagtcaggacattagcaactatttaaattggtatcagcagaaaccagggaaagcccctaagctcctgatctattccgcatccaccttgcaaagtggggtcccatcaaggttcagtggcagtggatctgggacagatttcactctcaccatcagcagtctgcaacctgaagattttgcaacttactactgtcaacagagttacagttctccttatagattcggccaagggaccaaggtggaaatcaaaaccacgacgccagcgccgcggccaccaacaccggcgcccaccatcgcgtcgcagcccctgtccctgcgcccagaggcgtgccggccagcggcggggggcgcagtgcacacgagggggctggacttcgcctgtgatatctacatctgggcgcccttggccgggacttgtggggtccttctcctgtcactggttatcaccctttactgccggagggaccagaggctgccccccgatgcccacaagccccctgggggaggcagtttccggacccccatccaagaggagcaggccgacgcccactccaccctggccaagatcagagtgaagttcagcaggagcgcagacgcccccgcgtaccagcagggccagaaccagctctataacgagctcaatctaggacgaagagaggagtacgatgttttggacaagagacgtggccgggaccctgagatggggggaaagccgagaaggaagaaccctcaggaaggcctgtacaatgaactgcagaaagataagatggcggaggcctacagtgagattgggatgaaaggcgagcgccggaggggcaaggggcacgatggcctttaccagggtctcagtacagccaccaaggacacctacgacgcccttcacatgcaggccctgccccctcgcggctctggcgagggaaggggttccctgcttacttgcggcgacgtcgaagagaatcccggtccgatggccctcccagtaactgccctccttttgcccctcgcactccttcttcatgccgctcgccccaactgggtcaacgtgattagcgatttgaagaaaatcgaggaccttatacagtctatgcatattgacgctacactgtatactgagagtgatgtacacccgtcctgtaaggtaacggccatgaaatgctttcttctggagctccaggtcatcagcttggagtctggggacgcaagcatccacgatacggttgaaaacctcatcatccttgcgaacaactctctctcatctaatggaaacgttacagagagtgggtgtaaggagtgcgaagagttggaagaaaaaaacatcaaagaatttcttcaatccttcgttcacatagtgcaaatgttcattaacacgtccactaccacacccgccccgaggccacctacgccggcaccgactatcgccagtcaacccctctctctgcgccccgaggcttgccggcctgcggctggtggggcggtccacacccggggcctggattttgcgtgcgatatatacatctgggcacctcttgccggcacctgcggagtgctgcttctctcactcgttattacgctgtactgctaa

SEQ ID NO: 337 - DNA, 2193 bp, Artificial Sequence
  Synthetic
  misc_feature: NK77.42_CD70_DB03_B01
atggccttaccagtgaccgccttgctcctgccgctggccttgctgctccacgccgccaggccggactacaaagacgatgacgataaaggcggtggtggctctggtggtggcggatcccaggtccagctggtgcagtctggggctgaggtgaagaagcctgggtcctcagtgaaggtctcctgcaaggcttctggatataccttcagcgactcctacatgcattgggtgcgacaggcccctggacaagggcttgagtgggtcggagggatcatccctatggcaggtatacccgcctacgcagaggaattccagggcagagtcacgattaccgcggacgagtccacgagcacagcctacatggagctgagcagcctgagatctgaggacacggccgtgtattactgtgcgagagccgacgattatgggggaaattggtacttcgatctctggggccgtggcaccctggtcactgtctcctcaggtggaggcggttcaggcggaggtggctctggcggtggcggatcggatattgtgatgactcagtctccactctccctgcccgtcacccctggagagccggcctccatctcctgcaggtctagtcagagcctcctccactctaatggctacaactatttggattggtacctgcagaagccagggcagtctccacagctcctgatctatgcagcttctagtctccagtccggggtccctgacaggttcagtggcagtggatcaggcacagattttacactgaaaatcagcagagtggaggctgaggatgttggggtttattactgcatgcaaggggcccattggcctccgacttttggccaggggaccaagctggagatcaaaaccacgacgccagcgccgcggccaccaacaccggcgcccaccatcgcgtcgcagcccctgtccctgcgcccagaggcgtgccggccagcggcggggggcgcagtgcacacgagggggctggacttcgcctgtgatatctacatctgggcgcccttggccgggacttgtggggtccttctcctgtcactggttatcaccctttactgccggagggaccagaggctgccccccgatgcccacaagccccctgggggaggcagtttccggacccccatccaagaggagcaggccgacgcccactccaccctggccaagatcagagtgaagttcagcaggagcgcagacgcccccgcgtaccagcagggccagaaccagctctataacgagctcaatctaggacgaagagaggagtacgatgttttggacaagagacgtggccgggaccctgagatggggggaaagccgagaaggaagaaccctcaggaaggcctgtacaatgaactgcagaaagataagatggcggaggcctacagtgagattgggatgaaaggcgagcgccggaggggcaaggggcacgatggcctttaccagggtctcagtacagccaccaaggacacctacgacgcccttcacatgcaggccctgccccctcgcggctctggcgagggaaggggttccctgcttacttgcggcgacgtcgaagagaatcccggtccgatggccctcccagtaactgccctccttttgcccctcgcactccttcttcatgccgctcgccccaactgggtcaacgtgattagcgatttgaagaaaatcgaggaccttatacagtctatgcatattgacgctacactgtatactgagagtgatgtacacccgtcctgtaaggtaacggccatgaaatgctttcttctggagctccaggtcatcagcttggagtctggggacgcaagcatccacgatacggttgaaaacctcatcatccttgcgaacaactctctctcatctaatggaaacgttacagagagtgggtgtaaggagtgcgaagagttggaagaaaaaaacatcaaagaatttcttcaatccttcgttcacatagtgcaaatgttcattaacacgtccactaccacacccgccccgaggccacctacgccggcaccgactatcgccagtcaacccctctctctgcgccccgaggcttgccggcctgcggctggtggggcggtccacacccggggcctggattttgcgtgcgatatatacatctgggcacctcttgccggcacctgcggagtgctgcttctctcactcgttattacgctgtactgctaa

SEQ ID NO: 338 - DNA, 2175 bp, Artificial Sequence
  Synthetic
  misc_feature: NK77.43_CD70_DB03_B04
atggccttaccagtgaccgccttgctcctgccgctggccttgctgctccacgccgccaggccggactacaaagacgatgacgataaaggcggtggtggctctggtggtggcggatcccaggtgcagctggtgcagtctggggctgaggtgaagaagcctggggcctcagtgaaggtttcctgcaaggcatctggatacatcttcaccgactactatatgcactgggtgcgacaggcccctggacaagggcttgagtggatgggaataatcaaccctagtggtggcagcacaagctacgcacagaagttccagggcagagtcaccatgaccagggacacgtccacgagcacagtctacatggagctgagcagcctgagatctgaggacacggccgtgtattactgtgctagagactcaggatggtatgagtcctggttcgacccctggggccagggaaccctggtcaccgtctcctcaggtggaggcggttcaggcggaggtggctctggcggtggcggatcggacatccagatgacccagtctccatcctccctgtctgcatctgtaggagacagagtcaccatcacttgccgggcaagtcaggacattagggatgggttaggctggtatcagcagaaaccagggaaagcccctaagctcctgatctatgctgcatccactttgcaaagtggggtcccatcaaggttcagtggcagtggatctgggacagatttcactctcaccatcagcagtctgcaacctgaagattttgcaacttactactgtcaacagagttacgggacccctcctacgttcggccaagggaccaaggtggaaatcaaaaccacgacgccagcgccgcggccaccaacaccggcgcccaccatcgcgtcgcagcccctgtccctgcgcccagaggcgtgccggccagcggcggggggcgcagtgcacacgagggggctggacttcgcctgtgatatctacatctgggcgcccttggccgggacttgtggggtccttctcctgtcactggttatcaccctttactgccggagggaccagaggctgccccccgatgcccacaagccccctgggggaggcagtttccggacccccatccaagaggagcaggccgacgcccactccaccctggccaagatcagagtgaagttcagcaggagcgcagacgcccccgcgtaccagcagggccagaaccagctctataacgagctcaatctaggacgaagagaggagtacgatgttttggacaagagacgtggccgggaccctgagatggggggaaagccgagaaggaagaaccctcaggaaggcctgtacaatgaactgcagaaagataagatggcggaggcctacagtgagattgggatgaaaggcgagcgccggaggggcaaggggcacgatggcctttaccagggtctcagtacagccaccaaggacacctacgacgcccttcacatgcaggccctgccccctcgcggctctggcgagggaaggggttccctgcttacttgcggcgacgtcgaagagaatcccggtccgatggccctcccagtaactgccctccttttgcccctcgcactccttcttcatgccgctcgccccaactgggtcaacgtgattagcgatttgaagaaaatcgaggaccttatacagtctatgcatattgacgctacactgtatactgagagtgatgtacacccgtcctgtaaggtaacggccatgaaatgctttcttctggagctccaggtcatcagcttggagtctggggacgcaagcatccacgatacggttgaaaacctcatcatccttgcgaacaactctctctcatctaatggaaacgttacagagagtgggtgtaaggagtgcgaagagttggaagaaaaaaacatcaaagaatttcttcaatccttcgttcacatagtgcaaatgttcattaacacgtccactaccacacccgccccgaggccacctacgccggcaccgactatcgccagtcaacccctctctctgcgccccgaggcttgccggcctgcggctggtggggcggtccacacccggggcctggattttgcgtgcgatatatacatctgggcacctcttgccggcacctgcggagtgctgcttctctcactcgttattacgctgtactgctaa

SEQ ID NO: 339 - DNA, 2178 bp, Artificial Sequence
  Synthetic
  misc_feature: NK77.44_CD70_DB03_B06
atggccttaccagtgaccgccttgctcctgccgctggccttgctgctccacgccgccaggccggactacaaagacgatgacgataaaggcggtggtggctctggtggtggcggatcccaggtgcagctggtgcagtctggggctgaggtgaagaagcctggggcctcagtgaaggtttcctgcaaggcatctggatacaccttcaccgactactatcttcactgggtgcgacaggcccctggacaagggcttgagtggatgggatggatcagcgcctacaatggtaacacaaattacgcacagaagttccagggcagagtcaccatgaccagggacacgtccacgagcacagtctacatggagctgagcagcctgagatctgaggacacggccgtgtattactgtgctagagagattgtgggtgctacagaagattggtacttcgatctctggggccgtggcaccctggtcactgtctcctcaggtggaggcggttcaggcggaggtggctctggcggtggcggatcggaaatagtgatgacgcagtctccagccaccctgtctgtgtctccaggggaaagagccaccctctcctgcagggccagtcagagtgttagcagctatttagcctggtaccagcagaaacctggccaggctcccaggctcctcatctatggtgcatccaccagggccactggtatcccagccaggttcagtggcagtgggtctgggacagagttcactctcaccatcagcagcctgcagtctgaagattttgcagtttattactgtcagcagtatgattcctcccctacgttcggccaagggaccaaggtggaaatcaaaaccacgacgccagcgccgcggccaccaacaccggcgcccaccatcgcgtcgcagcccctgtccctgcgcccagaggcgtgccggccagcggcggggggcgcagtgcacacgagggggctggacttcgcctgtgatatctacatctgggcgcccttggccgggacttgtggggtccttctcctgtcactggttatcaccctttactgccggagggaccagaggctgccccccgatgcccacaagccccctgggggaggcagtttccggacccccatccaagaggagcaggccgacgcccactccaccctggccaagatcagagtgaagttcagcaggagcgcagacgcccccgcgtaccagcagggccagaaccagctctataacgagctcaatctaggacgaagagaggagtacgatgttttggacaagagacgtggccgggaccctgagatggggggaaagccgagaaggaagaaccctcaggaaggcctgtacaatgaactgcagaaagataagatggcggaggcctacagtgagattgggatgaaaggcgagcgccggaggggcaaggggcacgatggcctttaccagggtctcagtacagccaccaaggacacctacgacgcccttcacatgcaggccctgccccctcgcggctctggcgagggaaggggttccctgcttacttgcggcgacgtcgaagagaatcccggtccgatggccctcccagtaactgccctccttttgcccctcgcactccttcttcatgccgctcgccccaactgggtcaacgtgattagcgatttgaagaaaatcgaggaccttatacagtctatgcatattgacgctacactgtatactgagagtgatgtacacccgtcctgtaaggtaacggccatgaaatgctttcttctggagctccaggtcatcagcttggagtctggggacgcaagcatccacgatacggttgaaaacctcatcatccttgcgaacaactctctctcatctaatggaaacgttacagagagtgggtgtaaggagtgcgaagagttggaagaaaaaaacatcaaagaatttcttcaatccttcgttcacatagtgcaaatgttcattaacacgtccactaccacacccgccccgaggccacctacgccggcaccgactatcgccagtcaacccctctctctgcgccccgaggcttgccggcctgcggctggtggggcggtccacacccggggcctggattttgcgtgcgatatatacatctgggcacctcttgccggcacctgcggagtgctgcttctctcactcgttattacgctgtactgctaa

SEQ ID NO: 340 - DNA, 2172 bp, Artificial Sequence
  Synthetic
  misc_feature: NK77.45_CD70_DB03_B09
atggccttaccagtgaccgccttgctcctgccgctggccttgctgctccacgccgccaggccggactacaaagacgatgacgataaaggcggtggtggctctggtggtggcggatcccaggtgcagctggtgcagtctggggctgaggtgaagaagcctggggcctcagtgaaggtttcctgcaaggcatctggatacaccttcaccgcctactatctgcactgggtgcgacaggcccctggacaagggcttgagtggatgggaatgatcaaccccaacaatggtggcacaatttacgcacagacattccagggcagagtcaccatgaccagggacacgtccacgagcacagtctacatggagctgagcagcctgagatctgaggacacggccgtgtattactgtgctagagacctgggcggctacgtcctgtttgactactggggccaagggaccctggtcaccgtctcctcaggtggaggcggttcaggcggaggtggctctggcggtggcggatcggacatccagatgacccagtctccatcctccctgtctgcatctgtaggagacagagtcaccatcacttgccgggcaagtcagagcattagcagctatttaaattggtatcagcagaaaccagggaaagcccctaagctcctgatctatgatgcatccaacttggaaaccggggtcccatcaaggttcagtggcagtggatctgggacagatttcactctcaccatcagcagtctgcaacctgaagattttgcaacttactactgtcaacagagtcacagtgcgcctatcaccttcggccaagggacacgactggagattaaaaccacgacgccagcgccgcggccaccaacaccggcgcccaccatcgcgtcgcagcccctgtccctgcgcccagaggcgtgccggccagcggcggggggcgcagtgcacacgagggggctggacttcgcctgtgatatctacatctgggcgcccttggccgggacttgtggggtccttctcctgtcactggttatcaccctttactgccggagggaccagaggctgccccccgatgcccacaagccccctgggggaggcagtttccggacccccatccaagaggagcaggccgacgcccactccaccctggccaagatcagagtgaagttcagcaggagcgcagacgcccccgcgtaccagcagggccagaaccagctctataacgagctcaatctaggacgaagagaggagtacgatgttttggacaagagacgtggccgggaccctgagatggggggaaagccgagaaggaagaaccctcaggaaggcctgtacaatgaactgcagaaagataagatggcggaggcctacagtgagattgggatgaaaggcgagcgccggaggggcaaggggcacgatggcctttaccagggtctcagtacagccaccaaggacacctacgacgcccttcacatgcaggccctgccccctcgcggctctggcgagggaaggggttccctgcttacttgcggcgacgtcgaagagaatcccggtccgatggccctcccagtaactgccctccttttgcccctcgcactccttcttcatgccgctcgccccaactgggtcaacgtgattagcgatttgaagaaaatcgaggaccttatacagtctatgcatattgacgctacactgtatactgagagtgatgtacacccgtcctgtaaggtaacggccatgaaatgctttcttctggagctccaggtcatcagcttggagtctggggacgcaagcatccacgatacggttgaaaacctcatcatccttgcgaacaactctctctcatctaatggaaacgttacagagagtgggtgtaaggagtgcgaagagttggaagaaaaaaacatcaaagaatttcttcaatccttcgttcacatagtgcaaatgttcattaacacgtccactaccacacccgccccgaggccacctacgccggcaccgactatcgccagtcaacccctctctctgcgccccgaggcttgccggcctgcggctggtggggcggtccacacccggggcctggattttgcgtgcgatatatacatctgggcacctcttgccggcacctgcggagtgctgcttctctcactcgttattacgctgtactgctaa

SEQ ID NO: 341 - DNA, 2172 bp, Artificial Sequence
  Synthetic
  misc_feature: NK77.46_CD70_DB03_C05
atggccttaccagtgaccgccttgctcctgccgctggccttgctgctccacgccgccaggccggactacaaagacgatgacgataaaggcggtggtggctctggtggtggcggatcccaggtgcagctggtgcagtctggggctgaggtgaagaagcctggggcctcagtgaaggtttcctgcaaggcatctggatacaccttcaccgactactatattcactgggtgcgacaggcccctggacaagggcttgagtggatgggaatgatcaaccctagaggaggtagcacaacttacgcacagtcattccagggcagagtcaccatgaccagggacacgtccacgagcacagtctacatggagctgagcagcctgagatctgaggacacggccgtgtattactgtgctagagatttaggtgactatggggactacgactactggggccaagggaccctggtcaccgtctcctcaggtggaggcggttcaggcggaggtggctctggcggtggcggatcggacatccagatgacccagtctccatcctccctgtctgcatctgtaggagacagagtcaccatcacttgccgggcaagtcagagcattagcacaaacttagcttggtatcagcagaaaccagggaaagcccctaagctcctgatctatgatgcatcctatttggaggctggggtcccatcaaggttcagtggcagtggatctgggacagatttcactctcaccatcagcagtctgcaacctgaagattttgcaacttactactgtcaacagagttacagtacccctccgacttttggccaggggaccaagctggagatcaaaaccacgacgccagcgccgcggccaccaacaccggcgcccaccatcgcgtcgcagcccctgtccctgcgcccagaggcgtgccggccagcggcggggggcgcagtgcacacgagggggctggacttcgcctgtgatatctacatctgggcgcccttggccgggacttgtggggtccttctcctgtcactggttatcaccctttactgccggagggaccagaggctgccccccgatgcccacaagccccctgggggaggcagtttccggacccccatccaagaggagcaggccgacgcccactccaccctggccaagatcagagtgaagttcagcaggagcgcagacgcccccgcgtaccagcagggccagaaccagctctataacgagctcaatctaggacgaagagaggagtacgatgttttggacaagagacgtggccgggaccctgagatggggggaaagccgagaaggaagaaccctcaggaaggcctgtacaatgaactgcagaaagataagatggcggaggcctacagtgagattgggatgaaaggcgagcgccggaggggcaaggggcacgatggcctttaccagggtctcagtacagccaccaaggacacctacgacgcccttcacatgcaggccctgccccctcgcggctctggcgagggaaggggttccctgcttacttgcggcgacgtcgaagagaatcccggtccgatggccctcccagtaactgccctccttttgcccctcgcactccttcttcatgccgctcgccccaactgggtcaacgtgattagcgatttgaagaaaatcgaggaccttatacagtctatgcatattgacgctacactgtatactgagagtgatgtacacccgtcctgtaaggtaacggccatgaaatgctttcttctggagctccaggtcatcagcttggagtctggggacgcaagcatccacgatacggttgaaaacctcatcatccttgcgaacaactctctctcatctaatggaaacgttacagagagtgggtgtaaggagtgcgaagagttggaagaaaaaaacatcaaagaatttcttcaatccttcgttcacatagtgcaaatgttcattaacacgtccactaccacacccgccccgaggccacctacgccggcaccgactatcgccagtcaacccctctctctgcgccccgaggcttgccggcctgcggctggtggggcggtccacacccggggcctggattttgcgtgcgatatatacatctgggcacctcttgccggcacctgcggagtgctgcttctctcactcgttattacgctgtactgctaa

SEQ ID NO: 342 - DNA, 2205 bp, Artificial Sequence
  Synthetic
  misc_feature: NK77.47_CD70_DB03_D11
atggccttaccagtgaccgccttgctcctgccgctggccttgctgctccacgccgccaggccggactacaaagacgatgacgataaaggcggtggtggctctggtggtggcggatccgaggtgcagctgttggagtctgggggaggcttggtacagcctggggggtccctgagactctcctgtgcagcctctggattcacctttagcaattcagatatgaattgggtccgccaggctccagggaaggggctggagtgggtctcagctattagtggtggaggtgacacactctactacgcagactccgtgaagggccggttcaccatctccagagacaattccaagaacacgctgtatctgcaaatgaacagcctgagagccgaggacacggccgtatattactgtgcgatggccagcgctttggacagtagcggtgacaatgaggcttttgatatctggggccaagggacaacagtcaccgtctcttcaggtggaggcggttcaggcggaggtggctctggcggtggcggatcggacatcgtgatgacccagtctccagactccctggctgtgtctctgggcgagagggccaccatcaactgcaagtccagccagagtgttttatattccagtaataacaagaactacttagcttggtaccagcagaaaccaggacagcctcctaagctgctcatttactgggcatctacccgggattccggggtccctgaccgattcagtggcagcgggtctgggacagatttcactctcaccatcagcagcctgcaggctgaagatgtggcagtttattactgtcagcaatattatggcttccctcccaccttcggccaagggacacgactggagattaaaaccacgacgccagcgccgcggccaccaacaccggcgcccaccatcgcgtcgcagcccctgtccctgcgcccagaggcgtgccggccagcggcggggggcgcagtgcacacgagggggctggacttcgcctgtgatatctacatctgggcgcccttggccgggacttgtggggtccttctcctgtcactggttatcaccctttactgccggagggaccagaggctgccccccgatgcccacaagccccctgggggaggcagtttccggacccccatccaagaggagcaggccgacgcccactccaccctggccaagatcagagtgaagttcagcaggagcgcagacgcccccgcgtaccagcagggccagaaccagctctataacgagctcaatctaggacgaagagaggagtacgatgttttggacaagagacgtggccgggaccctgagatggggggaaagccgagaaggaagaaccctcaggaaggcctgtacaatgaactgcagaaagataagatggcggaggcctacagtgagattgggatgaaaggcgagcgccggaggggcaaggggcacgatggcctttaccagggtctcagtacagccaccaaggacacctacgacgcccttcacatgcaggccctgccccctcgcggctctggcgagggaaggggttccctgcttacttgcggcgacgtcgaagagaatcccggtccgatggccctcccagtaactgccctccttttgcccctcgcactccttcttcatgccgctcgccccaactgggtcaacgtgattagcgatttgaagaaaatcgaggaccttatacagtctatgcatattgacgctacactgtatactgagagtgatgtacacccgtcctgtaaggtaacggccatgaaatgctttcttctggagctccaggtcatcagcttggagtctggggacgcaagcatccacgatacggttgaaaacctcatcatccttgcgaacaactctctctcatctaatggaaacgttacagagagtgggtgtaaggagtgcgaagagttggaagaaaaaaacatcaaagaatttcttcaatccttcgttcacatagtgcaaatgttcattaacacgtccactaccacacccgccccgaggccacctacgccggcaccgactatcgccagtcaacccctctctctgcgccccgaggcttgccggcctgcggctggtggggcggtccacacccggggcctggattttgcgtgcgatatatacatctgggcacctcttgccggcacctgcggagtgctgcttctctcactcgttattacgctgtactgctaa

SEQ ID NO: 343 - DNA, 2181 bp, Artificial Sequence
  Synthetic
  misc_feature: NK77.48_CD70_DB03_E01
atggccttaccagtgaccgccttgctcctgccgctggccttgctgctccacgccgccaggccggactacaaagacgatgacgataaaggcggtggtggctctggtggtggcggatcccaggtgcagctggtgcagtctggggctgaggtgaagaagcctggggcctcagtgaaggtttcctgcaaggcatctggatacaccttcaccagctactatatgcactgggtgcgacaggcccctggacaagggcttgagtggatgggatggatcaacccaaataacggtggtacaagctacgcacagaagttccagggcagagtcaccatgaccagggacacgtccacgagcacagtctacatggagctgagcagcctgagatctgaggacacggccgtgtattactgtgctagagtggaggacgatttctggagcggccctagctttgactactggggccaagggaccctggtcaccgtctcctcaggtggaggcggttcaggcggaggtggctctggcggtggcggatcggacatccagatgacccagtctccatcctccctgtctgcatctgtaggagacagagtcaccatcacttgccaagcaagtcacgacattagcaaattcttaaattggtatcagcagaaaccagggaaagcccctaagctcctgatctatgatgcatccaatttgcaacgaggggtcccatcaaggttcagtggcagtggatctgggacagatttcactctcaccatcagcagtctgcaacctgaagattttgcaacttactactgtcaacagacctacagtttccctttcacttttggccaggggaccaagctggagatcaaaaccacgacgccagcgccgcggccaccaacaccggcgcccaccatcgcgtcgcagcccctgtccctgcgcccagaggcgtgccggccagcggcggggggcgcagtgcacacgagggggctggacttcgcctgtgatatctacatctgggcgcccttggccgggacttgtggggtccttctcctgtcactggttatcaccctttactgccggagggaccagaggctgccccccgatgcccacaagccccctgggggaggcagtttccggacccccatccaagaggagcaggccgacgcccactccaccctggccaagatcagagtgaagttcagcaggagcgcagacgcccccgcgtaccagcagggccagaaccagctctataacgagctcaatctaggacgaagagaggagtacgatgttttggacaagagacgtggccgggaccctgagatggggggaaagccgagaaggaagaaccctcaggaaggcctgtacaatgaactgcagaaagataagatggcggaggcctacagtgagattgggatgaaaggcgagcgccggaggggcaaggggcacgatggcctttaccagggtctcagtacagccaccaaggacacctacgacgcccttcacatgcaggccctgccccctcgcggctctggcgagggaaggggttccctgcttacttgcggcgacgtcgaagagaatcccggtccgatggccctcccagtaactgccctccttttgcccctcgcactccttcttcatgccgctcgccccaactgggtcaacgtgattagcgatttgaagaaaatcgaggaccttatacagtctatgcatattgacgctacactgtatactgagagtgatgtacacccgtcctgtaaggtaacggccatgaaatgctttcttctggagctccaggtcatcagcttggagtctggggacgcaagcatccacgatacggttgaaaacctcatcatccttgcgaacaactctctctcatctaatggaaacgttacagagagtgggtgtaaggagtgcgaagagttggaagaaaaaaacatcaaagaatttcttcaatccttcgttcacatagtgcaaatgttcattaacacgtccactaccacacccgccccgaggccacctacgccggcaccgactatcgccagtcaacccctctctctgcgccccgaggcttgccggcctgcggctggtggggcggtccacacccggggcctggattttgcgtgcgatatatacatctgggcacctcttgccggcacctgcggagtgctgcttctctcactcgttattacgctgtactgctaa

SEQ ID NO: 344 - DNA, 2187 bp, Artificial Sequence
  Synthetic
  misc_feature: NK77.49_CD70_DB03_E03
atggccttaccagtgaccgccttgctcctgccgctggccttgctgctccacgccgccaggccggactacaaagacgatgacgataaaggcggtggtggctctggtggtggcggatcccaggtgcagctggtgcagtctggggctgaggtgaagaagcctgggtcctcggtgaaggtctcctgcaaggcttctggaggcaccttcaccaattatgctttcagctgggtgcgacaggcccctggacaagggcttgagtggatgggaggtatcatccctatcagcggtgccgcaaactacgcacagaagttccagggcagagtcacgattaccgcggacgaatccacgagcacagcctacatggagctgagcagcctgagatctgaggacacggccgtgtattactgtgcgagagggtccggactggacgatgcttttgatatctggggccaagggacaatggtcaccgtctcttcaggtggaggcggttcaggcggaggtggctctggcggtggcggatcggatattgtgatgactcagtctccactctccctgcccgtcacccctggagagccggcctccatctcctgcaggtctagtcagagcctcctccattcaaacgggtacaactatttggattggtacctgcagaagccagggcagtctccacagctcctgatctatgatgcctcttcccttcagtccggggtccctgacaggttcagtggcagtggatcaggcacagattttacactgaaaatcagcagagtggaggctgaggatgttggggtttattactgcatgcaagctcggcaaactcctctgaccttcggccaagggacacgactggagattaaaaccacgacgccagcgccgcggccaccaacaccggcgcccaccatcgcgtcgcagcccctgtccctgcgcccagaggcgtgccggccagcggcggggggcgcagtgcacacgagggggctggacttcgcctgtgatatctacatctgggcgcccttggccgggacttgtggggtccttctcctgtcactggttatcaccctttactgccggagggaccagaggctgccccccgatgcccacaagccccctgggggaggcagtttccggacccccatccaagaggagcaggccgacgcccactccaccctggccaagatcagagtgaagttcagcaggagcgcagacgcccccgcgtaccagcagggccagaaccagctctataacgagctcaatctaggacgaagagaggagtacgatgttttggacaagagacgtggccgggaccctgagatggggggaaagccgagaaggaagaaccctcaggaaggcctgtacaatgaactgcagaaagataagatggcggaggcctacagtgagattgggatgaaaggcgagcgccggaggggcaaggggcacgatggcctttaccagggtctcagtacagccaccaaggacacctacgacgcccttcacatgcaggccctgccccctcgcggctctggcgagggaaggggttccctgcttacttgcggcgacgtcgaagagaatcccggtccgatggccctcccagtaactgccctccttttgcccctcgcactccttcttcatgccgctcgccccaactgggtcaacgtgattagcgatttgaagaaaatcgaggaccttatacagtctatgcatattgacgctacactgtatactgagagtgatgtacacccgtcctgtaaggtaacggccatgaaatgctttcttctggagctccaggtcatcagcttggagtctggggacgcaagcatccacgatacggttgaaaacctcatcatccttgcgaacaactctctctcatctaatggaaacgttacagagagtgggtgtaaggagtgcgaagagttggaagaaaaaaacatcaaagaatttcttcaatccttcgttcacatagtgcaaatgttcattaacacgtccactaccacacccgccccgaggccacctacgccggcaccgactatcgccagtcaacccctctctctgcgccccgaggcttgccggcctgcggctggtggggcggtccacacccggggcctggattttgcgtgcgatatatacatctgggcacctcttgccggcacctgcggagtgctgcttctctcactcgttattacgctgtactgctaa

SEQ ID NO: 345 - DNA, 2217 bp, Artificial Sequence
  Synthetic
  misc_feature: NK77.50_CD70_DB03_E09
atggccttaccagtgaccgccttgctcctgccgctggccttgctgctccacgccgccaggccggactacaaagacgatgacgataaaggcggtggtggctctggtggtggcggatcccaggtgcagctggtgcagtctggggctgaggtgaagaagcctggggcctcagtgaaggtttcctgcaaggcatctggatacaccttcaccgcgtactatatgcactgggtgcgacaggcccctggacaagggcttgagtggatgggatggatgaaccccaatagtggtaacacaggatacgcacagaagttccagggcagagtcaccatgaccagggacacgtccacgagcacagtctacatggagctgagcagcctgagatctgaggacacggccgtgtattactgtgctagagagggcagaatcgattacggggactacgacgactactactattactacggtatggacgtgtggggccaagggaccactgtcaccgtctcctcaggtggaggcggttcaggcggaggtggctctggcggtggcggatcggatattgtgatgactcagtctccactctccctgcccgtcacccctggagagccggcctccatctcctgcaggtctagtcagagcctcctgcattcaaatggttacaactatttggattggtacctgcagaagccagggcagtctccacagctcctgatctatgctgcttctaatttacagggtggggtccctgacaggttcagtggcagtggatcaggcacagattttacactgaaaatcagcagagtggaggctgaggatgttggggtttattactgcatgcaaacactagagtcccctgtaactttcggcggagggaccaaggtggagatcaaaaccacgacgccagcgccgcggccaccaacaccggcgcccaccatcgcgtcgcagcccctgtccctgcgcccagaggcgtgccggccagcggcggggggcgcagtgcacacgagggggctggacttcgcctgtgatatctacatctgggcgcccttggccgggacttgtggggtccttctcctgtcactggttatcaccctttactgccggagggaccagaggctgccccccgatgcccacaagccccctgggggaggcagtttccggacccccatccaagaggagcaggccgacgcccactccaccctggccaagatcagagtgaagttcagcaggagcgcagacgcccccgcgtaccagcagggccagaaccagctctataacgagctcaatctaggacgaagagaggagtacgatgttttggacaagagacgtggccgggaccctgagatggggggaaagccgagaaggaagaaccctcaggaaggcctgtacaatgaactgcagaaagataagatggcggaggcctacagtgagattgggatgaaaggcgagcgccggaggggcaaggggcacgatggcctttaccagggtctcagtacagccaccaaggacacctacgacgcccttcacatgcaggccctgccccctcgcggctctggcgagggaaggggttccctgcttacttgcggcgacgtcgaagagaatcccggtccgatggccctcccagtaactgccctccttttgcccctcgcactccttcttcatgccgctcgccccaactgggtcaacgtgattagcgatttgaagaaaatcgaggaccttatacagtctatgcatattgacgctacactgtatactgagagtgatgtacacccgtcctgtaaggtaacggccatgaaatgctttcttctggagctccaggtcatcagcttggagtctggggacgcaagcatccacgatacggttgaaaacctcatcatccttgcgaacaactctctctcatctaatggaaacgttacagagagtgggtgtaaggagtgcgaagagttggaagaaaaaaacatcaaagaatttcttcaatccttcgttcacatagtgcaaatgttcattaacacgtccactaccacacccgccccgaggccacctacgccggcaccgactatcgccagtcaacccctctctctgcgccccgaggcttgccggcctgcggctggtggggcggtccacacccggggcctggattttgcgtgcgatatatacatctgggcacctcttgccggcacctgcggagtgctgcttctctcactcgttattacgctgtactgctaa

SEQ ID NO: 346 - DNA, 2175 bp, Artificial Sequence
  Synthetic
  misc_feature: NK77.51_CD70_DB03_F02
atggccttaccagtgaccgccttgctcctgccgctggccttgctgctccacgccgccaggccggactacaaagacgatgacgataaaggcggtggtggctctggtggtggcggatcccaggtgcagctggtgcagtctggggctgaggtgaagaagcctggggcctcagtgaaggtttcctgcaaggcatctggatacaccttcaccgattactatgtgcactgggtgcgacaggcccctggacaagggcttgagtggatgggaacgatcaaccctagtggtgggagcacaagctacgcacagaagttccagggcagagtcaccatgaccagggacacgtccacgagcacagtctacatggagctgagcagcctgagatctgaggacacggccgtgtattactgtgctagagaccagggactctggttcaccggttttgactactggggccaagggaccctggtcaccgtctcctcaggtggaggcggttcaggcggaggtggctctggcggtggcggatcggacatccagatgacccagtctccatcctccctgtctgcatctgtaggagacagagtcaccatcacttgccgggcaagtcagggcattagcaacaatttaaattggtatcagcagaaaccagggaaagcccctaagctcctgatctatgatgcatccaacttggaacgtggggtcccatcaaggttcagtggcagtggatctgggacagatttcactctcaccatcagcagtctgcaacctgaagattttgcaacttactactgtcaacagagttacgacggtcctatcaccttcggccaagggacacgactggagattaaaaccacgacgccagcgccgcggccaccaacaccggcgcccaccatcgcgtcgcagcccctgtccctgcgcccagaggcgtgccggccagcggcggggggcgcagtgcacacgagggggctggacttcgcctgtgatatctacatctgggcgcccttggccgggacttgtggggtccttctcctgtcactggttatcaccctttactgccggagggaccagaggctgccccccgatgcccacaagccccctgggggaggcagtttccggacccccatccaagaggagcaggccgacgcccactccaccctggccaagatcagagtgaagttcagcaggagcgcagacgcccccgcgtaccagcagggccagaaccagctctataacgagctcaatctaggacgaagagaggagtacgatgttttggacaagagacgtggccgggaccctgagatggggggaaagccgagaaggaagaaccctcaggaaggcctgtacaatgaactgcagaaagataagatggcggaggcctacagtgagattgggatgaaaggcgagcgccggaggggcaaggggcacgatggcctttaccagggtctcagtacagccaccaaggacacctacgacgcccttcacatgcaggccctgccccctcgcggctctggcgagggaaggggttccctgcttacttgcggcgacgtcgaagagaatcccggtccgatggccctcccagtaactgccctccttttgcccctcgcactccttcttcatgccgctcgccccaactgggtcaacgtgattagcgatttgaagaaaatcgaggaccttatacagtctatgcatattgacgctacactgtatactgagagtgatgtacacccgtcctgtaaggtaacggccatgaaatgctttcttctggagctccaggtcatcagcttggagtctggggacgcaagcatccacgatacggttgaaaacctcatcatccttgcgaacaactctctctcatctaatggaaacgttacagagagtgggtgtaaggagtgcgaagagttggaagaaaaaaacatcaaagaatttcttcaatccttcgttcacatagtgcaaatgttcattaacacgtccactaccacacccgccccgaggccacctacgccggcaccgactatcgccagtcaacccctctctctgcgccccgaggcttgccggcctgcggctggtggggcggtccacacccggggcctggattttgcgtgcgatatatacatctgggcacctcttgccggcacctgcggagtgctgcttctctcactcgttattacgctgtactgctaa

SEQ ID NO: 347 - DNA, 2175 bp, Artificial Sequence
  Synthetic
  misc_feature: NK77.52_CD70_DB03_F05
atggccttaccagtgaccgccttgctcctgccgctggccttgctgctccacgccgccaggccggactacaaagacgatgacgataaaggcggtggtggctctggtggtggcggatcccaggtgcagctggtgcagtctggggctgaggtgaagaagcctggggcctcagtgaaggtttcctgcaaggcatctggatacaccttcaccgcctaccacatgcactgggtgcgacaggcccctggacaagggcttgagtggatgggaataatcaaccctggagacggtgccacagggtacgcacagaatctccagggcagagtcaccatgaccagggacacgtccacgagcacagtctacatggagctgagcagcctgagatctgaggacacggccgtgtattactgtgctggtgagggcatttccggatcagatgcttttgatatctggggccaagggacattagtcaccgtctcttcaggtggaggcggttcaggcggaggtggctctggcggtggcggatcggacatccagatgacccagtctccatcctccctgtctgcatctgtaggagacagagtcaccatcacttgccgggcaagtcagagcattagcagctggttagcttggtatcagcagaaaccagggaaagcccctaagctcctgatctatgctgcatccagtttgcaaagtggggtcccatcaaggttcagtggcagtggatctgggacagatttcactctcaccatcagcagtctgcaacctgaagattttgcaacttactactgtttgcaggactacagttatcctctcactttcggcggagggaccaaggtggagatcaaaaccacgacgccagcgccgcggccaccaacaccggcgcccaccatcgcgtcgcagcccctgtccctgcgcccagaggcgtgccggccagcggcggggggcgcagtgcacacgagggggctggacttcgcctgtgatatctacatctgggcgcccttggccgggacttgtggggtccttctcctgtcactggttatcaccctttactgccggagggaccagaggctgccccccgatgcccacaagccccctgggggaggcagtttccggacccccatccaagaggagcaggccgacgcccactccaccctggccaagatcagagtgaagttcagcaggagcgcagacgcccccgcgtaccagcagggccagaaccagctctataacgagctcaatctaggacgaagagaggagtacgatgttttggacaagagacgtggccgggaccctgagatggggggaaagccgagaaggaagaaccctcaggaaggcctgtacaatgaactgcagaaagataagatggcggaggcctacagtgagattgggatgaaaggcgagcgccggaggggcaaggggcacgatggcctttaccagggtctcagtacagccaccaaggacacctacgacgcccttcacatgcaggccctgccccctcgcggctctggcgagggaaggggttccctgcttacttgcggcgacgtcgaagagaatcccggtccgatggccctcccagtaactgccctccttttgcccctcgcactccttcttcatgccgctcgccccaactgggtcaacgtgattagcgatttgaagaaaatcgaggaccttatacagtctatgcatattgacgctacactgtatactgagagtgatgtacacccgtcctgtaaggtaacggccatgaaatgctttcttctggagctccaggtcatcagcttggagtctggggacgcaagcatccacgatacggttgaaaacctcatcatccttgcgaacaactctctctcatctaatggaaacgttacagagagtgggtgtaaggagtgcgaagagttggaagaaaaaaacatcaaagaatttcttcaatccttcgttcacatagtgcaaatgttcattaacacgtccactaccacacccgccccgaggccacctacgccggcaccgactatcgccagtcaacccctctctctgcgccccgaggcttgccggcctgcggctggtggggcggtccacacccggggcctggattttgcgtgcgatatatacatctgggcacctcttgccggcacctgcggagtgctgcttctctcactcgttattacgctgtactgctaa

SEQ ID NO: 348 - DNA, 2169 bp, Artificial Sequence
  Synthetic
  misc_feature: NK77.53_CD70_DB03_F06
atggccttaccagtgaccgccttgctcctgccgctggccttgctgctccacgccgccaggccggactacaaagacgatgacgataaaggcggtggtggctctggtggtggcggatcccaggtgcagctggtgcagtctggggctgaggtgaagaagcctgggtcctcggtgaaggtctcctgcaaggcttctggaggcaccttcagcagctatgctatcagctgggtgcgacaggcccctggacaagggcttgagtggatgggatggatgaatcctaactctggtaacacaggttacgcacagaagttccagggcagagtcacgattaccgcggacgaatccacgagcacagcctacatggagctgagcagcctgagatctgaggacacggccgtgtattactgtgcgtggggagtcgatccgtactactttgactactggggccaagggaccctggtcaccgtctcctcaggtggaggcggttcaggcggaggtggctctggcggtggcggatcggacatccagatgacccagtctccatcctccctgtctgcatctgtaggagacagagtcaccatcacttgccgggcaagtcagagcattaacaggtggttagcgtggtatcagcagaaaccagggaaagcccctaagctcctgatctatgacgcatccaatttggagaccggggtcccatcaaggttcagtggcagtggatctgggacagatttcactctcaccatcagcagtctgcaacctgaagattttgcaacttactactgtcaacagagttacattacccctctcactttcggcggagggaccaaggtggagatcaaaaccacgacgccagcgccgcggccaccaacaccggcgcccaccatcgcgtcgcagcccctgtccctgcgcccagaggcgtgccggccagcggcggggggcgcagtgcacacgagggggctggacttcgcctgtgatatctacatctgggcgcccttggccgggacttgtggggtccttctcctgtcactggttatcaccctttactgccggagggaccagaggctgccccccgatgcccacaagccccctgggggaggcagtttccggacccccatccaagaggagcaggccgacgcccactccaccctggccaagatcagagtgaagttcagcaggagcgcagacgcccccgcgtaccagcagggccagaaccagctctataacgagctcaatctaggacgaagagaggagtacgatgttttggacaagagacgtggccgggaccctgagatggggggaaagccgagaaggaagaaccctcaggaaggcctgtacaatgaactgcagaaagataagatggcggaggcctacagtgagattgggatgaaaggcgagcgccggaggggcaaggggcacgatggcctttaccagggtctcagtacagccaccaaggacacctacgacgcccttcacatgcaggccctgccccctcgcggctctggcgagggaaggggttccctgcttacttgcggcgacgtcgaagagaatcccggtccgatggccctcccagtaactgccctccttttgcccctcgcactccttcttcatgccgctcgccccaactgggtcaacgtgattagcgatttgaagaaaatcgaggaccttatacagtctatgcatattgacgctacactgtatactgagagtgatgtacacccgtcctgtaaggtaacggccatgaaatgctttcttctggagctccaggtcatcagcttggagtctggggacgcaagcatccacgatacggttgaaaacctcatcatccttgcgaacaactctctctcatctaatggaaacgttacagagagtgggtgtaaggagtgcgaagagttggaagaaaaaaacatcaaagaatttcttcaatccttcgttcacatagtgcaaatgttcattaacacgtccactaccacacccgccccgaggccacctacgccggcaccgactatcgccagtcaacccctctctctgcgccccgaggcttgccggcctgcggctggtggggcggtccacacccggggcctggattttgcgtgcgatatatacatctgggcacctcttgccggcacctgcggagtgctgcttctctcactcgttattacgctgtactgctaa

SEQ ID NO: 349 - DNA, 2169 bp, Artificial Sequence
  Synthetic
  misc_feature: NK77.54_CD70_DB03_F09
atggccttaccagtgaccgccttgctcctgccgctggccttgctgctccacgccgccaggccggactacaaagacgatgacgataaaggcggtggtggctctggtggtggcggatcccaggtgcagctggtgcagtctggggctgaggtgaagaagcctggggcctcagtgaaggtttcctgcaaggcatctggatacaccttcaccagctactatatgcactgggtgcgacaggcccctggacaagggcttgagtggatgggaatattcaacccctccgatggtagcacaagctacgcacagaagttccagggcagagtcaccatgaccagggacacgtccacgagcacagtctacatggagctgagcagcctgagatctgaggacacggccgtgtattactgtgctagagatgttggtgagaccacgttcgacccctggggccagggaaccctggtcaccgtctcctcaggtggaggcggttcaggcggaggtggctctggcggtggcggatcggacatccagatgacccagtctccatcctccctgtctgcatctgtaggagacagagtcaccatcacttgccaggcaagtcaggatattagcaactatttaaattggtatcagcagaaaccagggaaagcccctaagctcctgatctatgacgcatccagtttggaaagtggggtcccatcaaggttcagtggcagtggatctgggacagatttcactctcaccatcagcagtctgcaacctgaagattttgcaacttactactgtcaacagactaatagttttcctatcaccttcggccaagggacacgactggagattaaaaccacgacgccagcgccgcggccaccaacaccggcgcccaccatcgcgtcgcagcccctgtccctgcgcccagaggcgtgccggccagcggcggggggcgcagtgcacacgagggggctggacttcgcctgtgatatctacatctgggcgcccttggccgggacttgtggggtccttctcctgtcactggttatcaccctttactgccggagggaccagaggctgccccccgatgcccacaagccccctgggggaggcagtttccggacccccatccaagaggagcaggccgacgcccactccaccctggccaagatcagagtgaagttcagcaggagcgcagacgcccccgcgtaccagcagggccagaaccagctctataacgagctcaatctaggacgaagagaggagtacgatgttttggacaagagacgtggccgggaccctgagatggggggaaagccgagaaggaagaaccctcaggaaggcctgtacaatgaactgcagaaagataagatggcggaggcctacagtgagattgggatgaaaggcgagcgccggaggggcaaggggcacgatggcctttaccagggtctcagtacagccaccaaggacacctacgacgcccttcacatgcaggccctgccccctcgcggctctggcgagggaaggggttccctgcttacttgcggcgacgtcgaagagaatcccggtccgatggccctcccagtaactgccctccttttgcccctcgcactccttcttcatgccgctcgccccaactgggtcaacgtgattagcgatttgaagaaaatcgaggaccttatacagtctatgcatattgacgctacactgtatactgagagtgatgtacacccgtcctgtaaggtaacggccatgaaatgctttcttctggagctccaggtcatcagcttggagtctggggacgcaagcatccacgatacggttgaaaacctcatcatccttgcgaacaactctctctcatctaatggaaacgttacagagagtgggtgtaaggagtgcgaagagttggaagaaaaaaacatcaaagaatttcttcaatccttcgttcacatagtgcaaatgttcattaacacgtccactaccacacccgccccgaggccacctacgccggcaccgactatcgccagtcaacccctctctctgcgccccgaggcttgccggcctgcggctggtggggcggtccacacccggggcctggattttgcgtgcgatatatacatctgggcacctcttgccggcacctgcggagtgctgcttctctcactcgttattacgctgtactgctaa

SEQ ID NO: 350 - DNA, 2184 bp, Artificial Sequence
  Synthetic
  misc_feature: NK77.55_CD70_DB03_F12
atggccttaccagtgaccgccttgctcctgccgctggccttgctgctccacgccgccaggccggactacaaagacgatgacgataaaggcggtggtggctctggtggtggcggatcccaggtgcagctcgttcaaagcggcgccgaggtcaagaaaccaggcgctagcgttaaagttagttgtaaagcctccggctatactttcacatcttacggcatttcttgggtacggcaggcaccggggcagggtttggaatggatggggtggatttccgcctataacggccacacaaattacgcgcagaaattccaggggcgcgttacgatgacacgcgatacctctacctctaccgtttatatggaacttagtagtcttcgttcggaggataccgctgtctactattgcgcacgtgacagtgtacggggttgggactactactacggcatgggggtctggggccaagggaccactgtcaccgtctcctcaggtggaggcggttcaggcggaggtggctctggcggtggcggatcggacatccagatgacccagtctccatcctccctgtctgcatctgtaggagacagagtcaccatcacttgccaggcaagtcaggacattagaaacttcttaaattggtatcagcagaaaccagggaaagcccctaagctcctgatctatgctgcatccacgttgcaaagtggggtcccatcaaggttcagtggcagtggatctgggacagatttcactctcaccatcagcagtctgcaacctgaagattttgcaacttactactgtcaacagagttacagtgcccctagcacttttggccaggggaccaagctggagatcaaaaccacgacgccagcgccgcggccaccaacaccggcgcccaccatcgcgtcgcagcccctgtccctgcgcccagaggcgtgccggccagcggcggggggcgcagtgcacacgagggggctggacttcgcctgtgatatctacatctgggcgcccttggccgggacttgtggggtccttctcctgtcactggttatcaccctttactgccggagggaccagaggctgccccccgatgcccacaagccccctgggggaggcagtttccggacccccatccaagaggagcaggccgacgcccactccaccctggccaagatcagagtgaagttcagcaggagcgcagacgcccccgcgtaccagcagggccagaaccagctctataacgagctcaatctaggacgaagagaggagtacgatgttttggacaagagacgtggccgggaccctgagatggggggaaagccgagaaggaagaaccctcaggaaggcctgtacaatgaactgcagaaagataagatggcggaggcctacagtgagattgggatgaaaggcgagcgccggaggggcaaggggcacgatggcctttaccagggtctcagtacagccaccaaggacacctacgacgcccttcacatgcaggccctgccccctcgcggctctggcgagggaaggggttccctgcttacttgcggcgacgtcgaagagaatcccggtccgatggccctcccagtaactgccctccttttgcccctcgcactccttcttcatgccgctcgccccaactgggtcaacgtgattagcgatttgaagaaaatcgaggaccttatacagtctatgcatattgacgctacactgtatactgagagtgatgtacacccgtcctgtaaggtaacggccatgaaatgctttcttctggagctccaggtcatcagcttggagtctggggacgcaagcatccacgatacggttgaaaacctcatcatccttgcgaacaactctctctcatctaatggaaacgttacagagagtgggtgtaaggagtgcgaagagttggaagaaaaaaacatcaaagaatttcttcaatccttcgttcacatagtgcaaatgttcattaacacgtccactaccacacccgccccgaggccacctacgccggcaccgactatcgccagtcaacccctctctctgcgccccgaggcttgccggcctgcggctggtggggcggtccacacccggggcctggattttgcgtgcgatatatacatctgggcacctcttgccggcacctgcggagtgctgcttctctcactcgttattacgctgtactgctaa

SEQ ID NO: 351 - DNA, 2175 bp, Artificial Sequence
  Synthetic
  misc_feature: NK77.56_CD70_DB03_G06
atggccttaccagtgaccgccttgctcctgccgctggccttgctgctccacgccgccaggccggactacaaagacgatgacgataaaggcggtggtggctctggtggtggcggatcccaggtgcagctggtgcagtctggggctgaggtgaagaagcctgggtcttcagtgaaggtttcctgcaaggcatctggatacaccttcatcgactactatatgcactgggtgcgacaggcccctggacaagggcttgagtggatgggatggatgaaccctcacagtggtaacagtgataatgcaccgaagttccagggcagagtcaccatcaccgcagacgagtccacgagcacagcatacatggagctgagcagcctgagatctgaggacacggccgtgtattactgtgctagaggttactccggatacgatctgacggctgactactggggccaagggaccctggtcaccgtctcctcaggtggaggcggttcaggcggaggtggctctggcggtggcggatcggacatccagatgacccagtctccatcctccctgtctgcatctgtaggagacagagtcaccatcacttgccgggcaagtcagagcattagcaattatttaaattggtatcagcagaaaccagggaaagcccctaagctcctgatctatgacgcatccaacttggagaccggggtcccatcaaggttcagtggcagtggatctgggacagatttcactctcaccatcagcagtctgcaacctgaagattttgcaacttactactgtcaacagagttacagtacccctatcaccttcggccaagggacacgactggagattaaaaccacgacgccagcgccgcggccaccaacaccggcgcccaccatcgcgtcgcagcccctgtccctgcgcccagaggcgtgccggccagcggcggggggcgcagtgcacacgagggggctggacttcgcctgtgatatctacatctgggcgcccttggccgggacttgtggggtccttctcctgtcactggttatcaccctttactgccggagggaccagaggctgccccccgatgcccacaagccccctgggggaggcagtttccggacccccatccaagaggagcaggccgacgcccactccaccctggccaagatcagagtgaagttcagcaggagcgcagacgcccccgcgtaccagcagggccagaaccagctctataacgagctcaatctaggacgaagagaggagtacgatgttttggacaagagacgtggccgggaccctgagatggggggaaagccgagaaggaagaaccctcaggaaggcctgtacaatgaactgcagaaagataagatggcggaggcctacagtgagattgggatgaaaggcgagcgccggaggggcaaggggcacgatggcctttaccagggtctcagtacagccaccaaggacacctacgacgcccttcacatgcaggccctgccccctcgcggctctggcgagggaaggggttccctgcttacttgcggcgacgtcgaagagaatcccggtccgatggccctcccagtaactgccctccttttgcccctcgcactccttcttcatgccgctcgccccaactgggtcaacgtgattagcgatttgaagaaaatcgaggaccttatacagtctatgcatattgacgctacactgtatactgagagtgatgtacacccgtcctgtaaggtaacggccatgaaatgctttcttctggagctccaggtcatcagcttggagtctggggacgcaagcatccacgatacggttgaaaacctcatcatccttgcgaacaactctctctcatctaatggaaacgttacagagagtgggtgtaaggagtgcgaagagttggaagaaaaaaacatcaaagaatttcttcaatccttcgttcacatagtgcaaatgttcattaacacgtccactaccacacccgccccgaggccacctacgccggcaccgactatcgccagtcaacccctctctctgcgccccgaggcttgccggcctgcggctggtggggcggtccacacccggggcctggattttgcgtgcgatatatacatctgggcacctcttgccggcacctgcggagtgctgcttctctcactcgttattacgctgtactgctaa

SEQ ID NO: 352 - DNA, 2202 bp, Artificial Sequence
  Synthetic
  misc_feature: NK77.57_CD70_DB03_G11
atggccttaccagtgaccgccttgctcctgccgctggccttgctgctccacgccgccaggccggactacaaagacgatgacgataaaggcggtggtggctctggtggtggcggatcccaggtgcagctggtgcagtctggggctgaggtgaagaagcctggggcctcagtgaaggtctcctgcaaggcttctggatacaccttcaccggccagtatatgcactgggtgcgacaggcccctggacaagggcttgagtggatgggatggatcaacccgaacactggtgacacaaactatgcacagaagtttcagggcagggtcaccatgaccagggacacgtccaccagcacagtatacatggagctgagcagcctgagatctgaagacacggccgtgtattactgtgcgagagacagcgttttcgaggttgaagggggtactgattattattattactacggtatggatgtctggggccaagggacaatggtcaccgtctcttcaggtggaggcggttcaggcggaggtggctctggcggtggcggatcggacatccagatgacccagtctccatcctccctgtctgcatctgtaggagacagagtcaccatcacttgccgggcaagtgaaaccattagcggctggttagcctggtatcagcagaaaccagggaaagcccctaagctcctgatctatgacgcatccaacttggagactggggtcccatcaaggttcagtggcagtggatctgggacagatttcactctcaccatcagcagtctgcaacctgaagattttgcaacttactactgtcaacagagttacagtaccccttggacgttcggccaagggaccaagctggaaatcaaaaccacgacgccagcgccgcggccaccaacaccggcgcccaccatcgcgtcgcagcccctgtccctgcgcccagaggcgtgccggccagcggcggggggcgcagtgcacacgagggggctggacttcgcctgtgatatctacatctgggcgcccttggccgggacttgtggggtccttctcctgtcactggttatcaccctttactgccggagggaccagaggctgccccccgatgcccacaagccccctgggggaggcagtttccggacccccatccaagaggagcaggccgacgcccactccaccctggccaagatcagagtgaagttcagcaggagcgcagacgcccccgcgtaccagcagggccagaaccagctctataacgagctcaatctaggacgaagagaggagtacgatgttttggacaagagacgtggccgggaccctgagatggggggaaagccgagaaggaagaaccctcaggaaggcctgtacaatgaactgcagaaagataagatggcggaggcctacagtgagattgggatgaaaggcgagcgccggaggggcaaggggcacgatggcctttaccagggtctcagtacagccaccaaggacacctacgacgcccttcacatgcaggccctgccccctcgcggctctggcgagggaaggggttccctgcttacttgcggcgacgtcgaagagaatcccggtccgatggccctcccagtaactgccctccttttgcccctcgcactccttcttcatgccgctcgccccaactgggtcaacgtgattagcgatttgaagaaaatcgaggaccttatacagtctatgcatattgacgctacactgtatactgagagtgatgtacacccgtcctgtaaggtaacggccatgaaatgctttcttctggagctccaggtcatcagcttggagtctggggacgcaagcatccacgatacggttgaaaacctcatcatccttgcgaacaactctctctcatctaatggaaacgttacagagagtgggtgtaaggagtgcgaagagttggaagaaaaaaacatcaaagaatttcttcaatccttcgttcacatagtgcaaatgttcattaacacgtccactaccacacccgccccgaggccacctacgccggcaccgactatcgccagtcaacccctctctctgcgccccgaggcttgccggcctgcggctggtggggcggtccacacccggggcctggattttgcgtgcgatatatacatctgggcacctcttgccggcacctgcggagtgctgcttctctcactcgttattacgctgtactgctaa

SEQ ID NO: 353 - DNA, 2172 bp, Artificial Sequence
  Synthetic
  misc_feature: NK77.58_CD70_DB03_H08
atggccttaccagtgaccgccttgctcctgccgctggccttgctgctccacgccgccaggccggactacaaagacgatgacgataaaggcggtggtggctctggtggtggcggatcccaggtgcagctggtgcagtctggggctgaggtgaagaagcctggggcctcagtgaaggtttcctgcaaggcatctggatacaccttcaccagctacgacattaattgggtgcgacaggcccctggacaagggcttgagtggatgggagtgatcaaccctagtggtggaggtacaagctacgcacagaagttccagggcagagtcaccatgaccagggacacgtccacgagcacagtctacatggagctgagcagcctgagatctgaggacacggccgtgtattactgtgctagatattctggctatgattgggtgtttgactactggggccaagggaccctggtcaccgtctcctcaggtggaggcggttcaggcggaggtggctctggcggtggcggatcggacatccagatgacccagtctccatcctccctgtctgcatctgtaggagacagagtcaccatcacttgccgggcaagtcagggcattggcagctggttagcttggtatcagcagaaaccagggaaagcccctaagctcctgatctatgctgcatccacattgcaaagtggggtcccatcaaggttcagtggcagtggatctgggacagatttcactctcaccatcagcagtctgcaacctgaagattttgcaacttactactgtcaacagagttacagtaccccttggactttcggccctgggaccaaagtggatatcaaaaccacgacgccagcgccgcggccaccaacaccggcgcccaccatcgcgtcgcagcccctgtccctgcgcccagaggcgtgccggccagcggcggggggcgcagtgcacacgagggggctggacttcgcctgtgatatctacatctgggcgcccttggccgggacttgtggggtccttctcctgtcactggttatcaccctttactgccggagggaccagaggctgccccccgatgcccacaagccccctgggggaggcagtttccggacccccatccaagaggagcaggccgacgcccactccaccctggccaagatcagagtgaagttcagcaggagcgcagacgcccccgcgtaccagcagggccagaaccagctctataacgagctcaatctaggacgaagagaggagtacgatgttttggacaagagacgtggccgggaccctgagatggggggaaagccgagaaggaagaaccctcaggaaggcctgtacaatgaactgcagaaagataagatggcggaggcctacagtgagattgggatgaaaggcgagcgccggaggggcaaggggcacgatggcctttaccagggtctcagtacagccaccaaggacacctacgacgcccttcacatgcaggccctgccccctcgcggctctggcgagggaaggggttccctgcttacttgcggcgacgtcgaagagaatcccggtccgatggccctcccagtaactgccctccttttgcccctcgcactccttcttcatgccgctcgccccaactgggtcaacgtgattagcgatttgaagaaaatcgaggaccttatacagtctatgcatattgacgctacactgtatactgagagtgatgtacacccgtcctgtaaggtaacggccatgaaatgctttcttctggagctccaggtcatcagcttggagtctggggacgcaagcatccacgatacggttgaaaacctcatcatccttgcgaacaactctctctcatctaatggaaacgttacagagagtgggtgtaaggagtgcgaagagttggaagaaaaaaacatcaaagaatttcttcaatccttcgttcacatagtgcaaatgttcattaacacgtccactaccacacccgccccgaggccacctacgccggcaccgactatcgccagtcaacccctctctctgcgccccgaggcttgccggcctgcggctggtggggcggtccacacccggggcctggattttgcgtgcgatatatacatctgggcacctcttgccggcacctgcggagtgctgcttctctcactcgttattacgctgtactgctaa

SEQ ID NO: 354 - DNA, 2175 bp, Artificial Sequence
  Synthetic
  misc_feature: NK77.59_CD70_DB03_H10
atggccttaccagtgaccgccttgctcctgccgctggccttgctgctccacgccgccaggccggactacaaagacgatgacgataaaggcggtggtggctctggtggtggcggatcccaggtgcagctggtgcagtctggggctgaggtgaagaagcctggggcctcagtgaaggtttcctgcaaggcatctggatacaccttcgctaactactatatgcactgggtgcgacaggcccctggacaagggcttgagtggatgggaataatcaaccctagtggtggtagcacaagctacgcacagaagttccagggcagagtcaccatgaccagggacacgtccacgagcacagtctacatggagctgagcagcctgagatctgaggacacggccgtgtattactgtgctagagatagcggctcctactttggttggttcgacccctggggccagggaaccctggtcaccgtctcctcaggtggaggcggttcaggcggaggtggctctggcggtggcggatcggacatccagatgacccagtctccatcctccctgtctgcatctgtaggagacagagtcaccatcacttgccgggcaagtcagagcattagcagctctttagcatggtatcagcagaaaccagggaaagcccctaagctcctgatctatgatgcatccagtttgcaaagtggggtcccatcaaggttcagtggcagtggatctgggacagatttcactctcaccatcagcagtctgcaacctgaagattttgcaacttactactgtcaacagagttacaacacccctcccactttcggcggagggaccaagctggagatcaaaaccacgacgccagcgccgcggccaccaacaccggcgcccaccatcgcgtcgcagcccctgtccctgcgcccagaggcgtgccggccagcggcggggggcgcagtgcacacgagggggctggacttcgcctgtgatatctacatctgggcgcccttggccgggacttgtggggtccttctcctgtcactggttatcaccctttactgccggagggaccagaggctgccccccgatgcccacaagccccctgggggaggcagtttccggacccccatccaagaggagcaggccgacgcccactccaccctggccaagatcagagtgaagttcagcaggagcgcagacgcccccgcgtaccagcagggccagaaccagctctataacgagctcaatctaggacgaagagaggagtacgatgttttggacaagagacgtggccgggaccctgagatggggggaaagccgagaaggaagaaccctcaggaaggcctgtacaatgaactgcagaaagataagatggcggaggcctacagtgagattgggatgaaaggcgagcgccggaggggcaaggggcacgatggcctttaccagggtctcagtacagccaccaaggacacctacgacgcccttcacatgcaggccctgccccctcgcggctctggcgagggaaggggttccctgcttacttgcggcgacgtcgaagagaatcccggtccgatggccctcccagtaactgccctccttttgcccctcgcactccttcttcatgccgctcgccccaactgggtcaacgtgattagcgatttgaagaaaatcgaggaccttatacagtctatgcatattgacgctacactgtatactgagagtgatgtacacccgtcctgtaaggtaacggccatgaaatgctttcttctggagctccaggtcatcagcttggagtctggggacgcaagcatccacgatacggttgaaaacctcatcatccttgcgaacaactctctctcatctaatggaaacgttacagagagtgggtgtaaggagtgcgaagagttggaagaaaaaaacatcaaagaatttcttcaatccttcgttcacatagtgcaaatgttcattaacacgtccactaccacacccgccccgaggccacctacgccggcaccgactatcgccagtcaacccctctctctgcgccccgaggcttgccggcctgcggctggtggggcggtccacacccggggcctggattttgcgtgcgatatatacatctgggcacctcttgccggcacctgcggagtgctgcttctctcactcgttattacgctgtactgctaa

SEQ ID NO: 355 - DNA, 2175 bp, Artificial Sequence
  Synthetic
  misc_feature: NK77.60_CD70_DB04_A05
atggccttaccagtgaccgccttgctcctgccgctggccttgctgctccacgccgccaggccggactacaaagacgatgacgataaaggcggtggtggctctggtggtggcggatcccaggtgcagctggtgcagtctggggctgaggtgaagaagcctggggcctcagtgaaggtttcctgcaaggcatctggatacaccttcaccacatactatatgcactgggtgcgacaggcccctggacaagggcttgagtggatgggaataatcaaccctaccggcggtagcacatactacgcacagaagttccagggcagagtcaccatgaccagggacacgtccacgagcacagtctacatggagctgagcagcctgagatctgaggacacggccgtgtattactgtgctagagacagcgggaactatcaagggatctttgactactggggccaagggaccctggtcaccgtctcctcaggtggaggcggttcaggcggaggtggctctggcggtggcggatcggacatccagatgacccagtctccatcctccctgtctgcatctgtaggagacagagtcaccatcacttgccgggcaagtcaggggattggcggctatttagcctggtatcagcagaaaccagggaaagcccctaagctcctgatctatgatgcatccaatttggagaccggggtcccatcaaggttcagtggcagtggatctgggacagatttcactctcaccatcagcagtctgcaacctgaagattttgcaacttactactgtcaacagagttacgactcccctcccaccttcggccaagggacacgactggagattaaaaccacgacgccagcgccgcggccaccaacaccggcgcccaccatcgcgtcgcagcccctgtccctgcgcccagaggcgtgccggccagcggcggggggcgcagtgcacacgagggggctggacttcgcctgtgatatctacatctgggcgcccttggccgggacttgtggggtccttctcctgtcactggttatcaccctttactgccggagggaccagaggctgccccccgatgcccacaagccccctgggggaggcagtttccggacccccatccaagaggagcaggccgacgcccactccaccctggccaagatcagagtgaagttcagcaggagcgcagacgcccccgcgtaccagcagggccagaaccagctctataacgagctcaatctaggacgaagagaggagtacgatgttttggacaagagacgtggccgggaccctgagatggggggaaagccgagaaggaagaaccctcaggaaggcctgtacaatgaactgcagaaagataagatggcggaggcctacagtgagattgggatgaaaggcgagcgccggaggggcaaggggcacgatggcctttaccagggtctcagtacagccaccaaggacacctacgacgcccttcacatgcaggccctgccccctcgcggctctggcgagggaaggggttccctgcttacttgcggcgacgtcgaagagaatcccggtccgatggccctcccagtaactgccctccttttgcccctcgcactccttcttcatgccgctcgccccaactgggtcaacgtgattagcgatttgaagaaaatcgaggaccttatacagtctatgcatattgacgctacactgtatactgagagtgatgtacacccgtcctgtaaggtaacggccatgaaatgctttcttctggagctccaggtcatcagcttggagtctggggacgcaagcatccacgatacggttgaaaacctcatcatccttgcgaacaactctctctcatctaatggaaacgttacagagagtgggtgtaaggagtgcgaagagttggaagaaaaaaacatcaaagaatttcttcaatccttcgttcacatagtgcaaatgttcattaacacgtccactaccacacccgccccgaggccacctacgccggcaccgactatcgccagtcaacccctctctctgcgccccgaggcttgccggcctgcggctggtggggcggtccacacccggggcctggattttgcgtgcgatatatacatctgggcacctcttgccggcacctgcggagtgctgcttctctcactcgttattacgctgtactgctaa

SEQ ID NO: 356 - DNA, 2172 bp, Artificial Sequence
  Synthetic
  misc_feature: NK77.61_CD70_DB04_A07
atggccttaccagtgaccgccttgctcctgccgctggccttgctgctccacgccgccaggccggactacaaagacgatgacgataaaggcggtggtggctctggtggtggcggatcccaggtgcagctggtgcagtctggggctgaggtgaagaagcctggggcctcagtgaaggtttcctgcaaggcatctggaaataccttcaccagctactatatgcactgggtgcgacaggcccctggacaagggcttgagtggatgggatggatcaaccccaacagtggtgacacaaattacgcacagaacttccagggcagagtcaccatgaccagggacacgtccacgagcacagtctacatggagctgagcagcctgagatctgaggacacggccgtgtattactgtgctagaggtgtcagcggttacgatctatttgactactggggccaagggaccctggtcaccgtctcctcaggtggaggcggttcaggcggaggtggctctggcggtggcggatcggacatccagatgacccagtctccatcctccctgtctgcatctgtaggagacagagtcaccatcacttgccgggcaagtcagagcgtgagcagctatttaaattggtatcagcagaaaccagggaaagcccctaagctcctgatctatgatacgtccaacttggagacgggggtcccatcaaggttcagtggcagtggatctgggacagatttcactctcaccatcagcagtctgcaacctgaagattttgcaacttactactgtcaacaggctcatagttttcctctcactttcggcggagggaccaaggtggagatcaaaaccacgacgccagcgccgcggccaccaacaccggcgcccaccatcgcgtcgcagcccctgtccctgcgcccagaggcgtgccggccagcggcggggggcgcagtgcacacgagggggctggacttcgcctgtgatatctacatctgggcgcccttggccgggacttgtggggtccttctcctgtcactggttatcaccctttactgccggagggaccagaggctgccccccgatgcccacaagccccctgggggaggcagtttccggacccccatccaagaggagcaggccgacgcccactccaccctggccaagatcagagtgaagttcagcaggagcgcagacgcccccgcgtaccagcagggccagaaccagctctataacgagctcaatctaggacgaagagaggagtacgatgttttggacaagagacgtggccgggaccctgagatggggggaaagccgagaaggaagaaccctcaggaaggcctgtacaatgaactgcagaaagataagatggcggaggcctacagtgagattgggatgaaaggcgagcgccggaggggcaaggggcacgatggcctttaccagggtctcagtacagccaccaaggacacctacgacgcccttcacatgcaggccctgccccctcgcggctctggcgagggaaggggttccctgcttacttgcggcgacgtcgaagagaatcccggtccgatggccctcccagtaactgccctccttttgcccctcgcactccttcttcatgccgctcgccccaactgggtcaacgtgattagcgatttgaagaaaatcgaggaccttatacagtctatgcatattgacgctacactgtatactgagagtgatgtacacccgtcctgtaaggtaacggccatgaaatgctttcttctggagctccaggtcatcagcttggagtctggggacgcaagcatccacgatacggttgaaaacctcatcatccttgcgaacaactctctctcatctaatggaaacgttacagagagtgggtgtaaggagtgcgaagagttggaagaaaaaaacatcaaagaatttcttcaatccttcgttcacatagtgcaaatgttcattaacacgtccactaccacacccgccccgaggccacctacgccggcaccgactatcgccagtcaacccctctctctgcgccccgaggcttgccggcctgcggctggtggggcggtccacacccggggcctggattttgcgtgcgatatatacatctgggcacctcttgccggcacctgcggagtgctgcttctctcactcgttattacgctgtactgctaa

SEQ ID NO: 357 - DNA, 2172 bp, Artificial Sequence
  Synthetic
  misc_feature: NK77.62_CD70_DB04_A10
atggccttaccagtgaccgccttgctcctgccgctggccttgctgctccacgccgccaggccggactacaaagacgatgacgataaaggcggtggtggctctggtggtggcggatccgaggtgcagctggtggagtctgggggaggcttggtcaagcctggggggtccctgagactctcctgtgcagcgtctggattcaccttcagtagctatggcatgcactgggtccgccaggctccaggcaaggggctggagtgggtggcatcgataaaacatgatggaagtgagcaatactatgttgactccgtgaagggccgattcaccatctccagagacgattccaagaacacgctgtatctgcaaatgaacagcctgaaaacggaggacacggctgtgtattactgtgcggctagtggagtggatgtctggggccaagggacaaccgtcaccgtctcttcaggtggaggcggttcaggcggaggtggctctggcggtggcggatcggatattgtgatgactcagtctccactctccctgcccgtcacccctggagagccggcctccatctcctgcaggtctagtcagagcctcctgcacagcaatggctacaactatttggattggtacctgcagaagccagggcagtctccacagctcctgatctatttgggttctacccgggcctccggggtccctgacaggttcagtggcagtggatcaggcacagattttacactgaaaatcagcagagtggaggctgaggatgttggggtttattactgcatgcaagctctagatactcctctcactttcggcggagggaccaagttagagatcaaaaccacgacgccagcgccgcggccaccaacaccggcgcccaccatcgcgtcgcagcccctgtccctgcgcccagaggcgtgccggccagcggcggggggcgcagtgcacacgagggggctggacttcgcctgtgatatctacatctgggcgcccttggccgggacttgtggggtccttctcctgtcactggttatcaccctttactgccggagggaccagaggctgccccccgatgcccacaagccccctgggggaggcagtttccggacccccatccaagaggagcaggccgacgcccactccaccctggccaagatcagagtgaagttcagcaggagcgcagacgcccccgcgtaccagcagggccagaaccagctctataacgagctcaatctaggacgaagagaggagtacgatgttttggacaagagacgtggccgggaccctgagatggggggaaagccgagaaggaagaaccctcaggaaggcctgtacaatgaactgcagaaagataagatggcggaggcctacagtgagattgggatgaaaggcgagcgccggaggggcaaggggcacgatggcctttaccagggtctcagtacagccaccaaggacacctacgacgcccttcacatgcaggccctgccccctcgcggctctggcgagggaaggggttccctgcttacttgcggcgacgtcgaagagaatcccggtccgatggccctcccagtaactgccctccttttgcccctcgcactccttcttcatgccgctcgccccaactgggtcaacgtgattagcgatttgaagaaaatcgaggaccttatacagtctatgcatattgacgctacactgtatactgagagtgatgtacacccgtcctgtaaggtaacggccatgaaatgctttcttctggagctccaggtcatcagcttggagtctggggacgcaagcatccacgatacggttgaaaacctcatcatccttgcgaacaactctctctcatctaatggaaacgttacagagagtgggtgtaaggagtgcgaagagttggaagaaaaaaacatcaaagaatttcttcaatccttcgttcacatagtgcaaatgttcattaacacgtccactaccacacccgccccgaggccacctacgccggcaccgactatcgccagtcaacccctctctctgcgccccgaggcttgccggcctgcggctggtggggcggtccacacccggggcctggattttgcgtgcgatatatacatctgggcacctcttgccggcacctgcggagtgctgcttctctcactcgttattacgctgtactgctaa

SEQ ID NO: 358 - DNA, 2181 bp, Artificial Sequence
  Synthetic
  misc_feature: NK77.63_CD70_DB04_A11
atggccttaccagtgaccgccttgctcctgccgctggccttgctgctccacgccgccaggccggactacaaagacgatgacgataaaggcggtggtggctctggtggtggcggatcccaggtgcagctggtgcagtctggggctgaggtgaagaagcctggggcctcagtgaaggtttcctgcaaggcatctggaggtaccttcagtcgttacgacattaattgggtgcgacaggcccctggacaagggcttgagtgggtgggaataatcgatcctacaggtgcgtcaacaagctacgcacagaagttccagggcagagtcaccatgaccagggacacgtccacgagcacagtctacatggagctgagcagcctgagatctgaggacacggccgtgtattactgtgctagagattacagttacgggatggattattatggcatggacgtctggggccaagggaccctggtcaccgtctcctcaggtggaggcggttcaggcggaggtggctctggcggtggcggatcggacatccagatgacccagtctccatcctccctgtctgcatctgtaggagacagagtcaccatcacttgccaggcgagtcaggacattagcaactatttaaattggtatcagcagaaaccagggaaagcccctaagctcctgatctacgatacctccaatttgcagacaggggtcccatcaaggttcagtggaagtggatctgggacagattttactcttaccatcagcagcctgcagcctgaagattttgcaacatattacctgagcacagatctgcagaccaccgctcacttcggccaagggaccaaggtggaaatcaaaaccacgacgccagcgccgcggccaccaacaccggcgcccaccatcgcgtcgcagcccctgtccctgcgcccagaggcgtgccggccagcggcggggggcgcagtgcacacgagggggctggacttcgcctgtgatatctacatctgggcgcccttggccgggacttgtggggtccttctcctgtcactggttatcaccctttactgccggagggaccagaggctgccccccgatgcccacaagccccctgggggaggcagtttccggacccccatccaagaggagcaggccgacgcccactccaccctggccaagatcagagtgaagttcagcaggagcgcagacgcccccgcgtaccagcagggccagaaccagctctataacgagctcaatctaggacgaagagaggagtacgatgttttggacaagagacgtggccgggaccctgagatggggggaaagccgagaaggaagaaccctcaggaaggcctgtacaatgaactgcagaaagataagatggcggaggcctacagtgagattgggatgaaaggcgagcgccggaggggcaaggggcacgatggcctttaccagggtctcagtacagccaccaaggacacctacgacgcccttcacatgcaggccctgccccctcgcggctctggcgagggaaggggttccctgcttacttgcggcgacgtcgaagagaatcccggtccgatggccctcccagtaactgccctccttttgcccctcgcactccttcttcatgccgctcgccccaactgggtcaacgtgattagcgatttgaagaaaatcgaggaccttatacagtctatgcatattgacgctacactgtatactgagagtgatgtacacccgtcctgtaaggtaacggccatgaaatgctttcttctggagctccaggtcatcagcttggagtctggggacgcaagcatccacgatacggttgaaaacctcatcatccttgcgaacaactctctctcatctaatggaaacgttacagagagtgggtgtaaggagtgcgaagagttggaagaaaaaaacatcaaagaatttcttcaatccttcgttcacatagtgcaaatgttcattaacacgtccactaccacacccgccccgaggccacctacgccggcaccgactatcgccagtcaacccctctctctgcgccccgaggcttgccggcctgcggctggtggggcggtccacacccggggcctggattttgcgtgcgatatatacatctgggcacctcttgccggcacctgcggagtgctgcttctctcactcgttattacgctgtactgctaa

SEQ ID NO: 359 - DNA, 2187 bp, Artificial Sequence
  Synthetic
  misc_feature: NK77.64_CD70_DB04_B03
atggccttaccagtgaccgccttgctcctgccgctggccttgctgctccacgccgccaggccggactacaaagacgatgacgataaaggcggtggtggctctggtggtggcggatcccaggtgcagctggtgcagtctggggctgaggtgaagaagcctgggtcctcggtgaaggtctcctgcaaggcttctggatacaccttcaccagctatggaatcagctgggtgcgacaggcccctggacaagggcttgagtggatgggaggtatcatccctatctttggtacaacgaactacgcacagaagttccagggcagagtcacgattaccgcggacgaatccacgagcacagcctacatggagctgagcagcctgagatctgaggacacggccgtgtattactgtgcgagagatcatagcggcgatgggtacttcgatctctggggccgtggcaccctggtcactgtctcctcaggtggaggcggttcaggcggaggtggctctggcggtggcggatcggatattgtgatgactcagtctccactctccctgcccgtcacccctggagagccggcctccatctcctgcaggtctagtcagagcctcctgcactccaacggatacaactatttggattggtacctgcagaagccagggcagtctccacagctcctgatctatgatgcctcttcacttcagtccggggtccctgacaggttcagtggcagtggatcaggcacagattttacactgaaaatcagcagagtggaggctgaggatgttggggtttattactgcatgcaaggaacacactggcctcccacgttcggccaagggaccaaggtggaaatcaaaaccacgacgccagcgccgcggccaccaacaccggcgcccaccatcgcgtcgcagcccctgtccctgcgcccagaggcgtgccggccagcggcggggggcgcagtgcacacgagggggctggacttcgcctgtgatatctacatctgggcgcccttggccgggacttgtggggtccttctcctgtcactggttatcaccctttactgccggagggaccagaggctgccccccgatgcccacaagccccctgggggaggcagtttccggacccccatccaagaggagcaggccgacgcccactccaccctggccaagatcagagtgaagttcagcaggagcgcagacgcccccgcgtaccagcagggccagaaccagctctataacgagctcaatctaggacgaagagaggagtacgatgttttggacaagagacgtggccgggaccctgagatggggggaaagccgagaaggaagaaccctcaggaaggcctgtacaatgaactgcagaaagataagatggcggaggcctacagtgagattgggatgaaaggcgagcgccggaggggcaaggggcacgatggcctttaccagggtctcagtacagccaccaaggacacctacgacgcccttcacatgcaggccctgccccctcgcggctctggcgagggaaggggttccctgcttacttgcggcgacgtcgaagagaatcccggtccgatggccctcccagtaactgccctccttttgcccctcgcactccttcttcatgccgctcgccccaactgggtcaacgtgattagcgatttgaagaaaatcgaggaccttatacagtctatgcatattgacgctacactgtatactgagagtgatgtacacccgtcctgtaaggtaacggccatgaaatgctttcttctggagctccaggtcatcagcttggagtctggggacgcaagcatccacgatacggttgaaaacctcatcatccttgcgaacaactctctctcatctaatggaaacgttacagagagtgggtgtaaggagtgcgaagagttggaagaaaaaaacatcaaagaatttcttcaatccttcgttcacatagtgcaaatgttcattaacacgtccactaccacacccgccccgaggccacctacgccggcaccgactatcgccagtcaacccctctctctgcgccccgaggcttgccggcctgcggctggtggggcggtccacacccggggcctggattttgcgtgcgatatatacatctgggcacctcttgccggcacctgcggagtgctgcttctctcactcgttattacgctgtactgctaa

SEQ ID NO: 360 - DNA, 2169 bp, Artificial Sequence
  Synthetic
  misc_feature: NK77.65_CD70_DB04_B05
atggccttaccagtgaccgccttgctcctgccgctggccttgctgctccacgccgccaggccggactacaaagacgatgacgataaaggcggtggtggctctggtggtggcggatcccaggtgcagctggtgcagtctggggctgaggtgaagaagcctggggcctcagtgaaggtctcctgcaaggcttctggatacaccttcaccgagaatgagatgcactgggtgcgacaggcccctggacaagggcttgagtggatgggatggatcaacccgaacagtggtggcacaaactatgcacagaagtttcagggcagggtcaccatgaccagggacacgtccactagcacagtgtacatggagctgagctctctgagatctgaagacacggccgtgtattactgtgcggggagctggggtggttactactttgactactggggccaagggaccctggtcaccgtctcctcaggtggaggcggttcaggcggaggtggctctggcggtggcggatcggacatccagatgacccagtctccatcctccctgtctgcatctgtaggagacagagtcaccatcacttgccgggcaagtcagagcgttagcagatatttaaattggtatcagcagaaaccagggaaagcccctaagctcctgatctatgatgcatccaatttggaaaccggggtcccatcaaggttcagtggcagtggatctgggacagatttcactctcaccatcagcagtctgcaacctgaagattttgcaacttactactgtcaacaggccgacagtttccctgtgacttttggccaggggaccaagctggagatcaaaaccacgacgccagcgccgcggccaccaacaccggcgcccaccatcgcgtcgcagcccctgtccctgcgcccagaggcgtgccggccagcggcggggggcgcagtgcacacgagggggctggacttcgcctgtgatatctacatctgggcgcccttggccgggacttgtggggtccttctcctgtcactggttatcaccctttactgccggagggaccagaggctgccccccgatgcccacaagccccctgggggaggcagtttccggacccccatccaagaggagcaggccgacgcccactccaccctggccaagatcagagtgaagttcagcaggagcgcagacgcccccgcgtaccagcagggccagaaccagctctataacgagctcaatctaggacgaagagaggagtacgatgttttggacaagagacgtggccgggaccctgagatggggggaaagccgagaaggaagaaccctcaggaaggcctgtacaatgaactgcagaaagataagatggcggaggcctacagtgagattgggatgaaaggcgagcgccggaggggcaaggggcacgatggcctttaccagggtctcagtacagccaccaaggacacctacgacgcccttcacatgcaggccctgccccctcgcggctctggcgagggaaggggttccctgcttacttgcggcgacgtcgaagagaatcccggtccgatggccctcccagtaactgccctccttttgcccctcgcactccttcttcatgccgctcgccccaactgggtcaacgtgattagcgatttgaagaaaatcgaggaccttatacagtctatgcatattgacgctacactgtatactgagagtgatgtacacccgtcctgtaaggtaacggccatgaaatgctttcttctggagctccaggtcatcagcttggagtctggggacgcaagcatccacgatacggttgaaaacctcatcatccttgcgaacaactctctctcatctaatggaaacgttacagagagtgggtgtaaggagtgcgaagagttggaagaaaaaaacatcaaagaatttcttcaatccttcgttcacatagtgcaaatgttcattaacacgtccactaccacacccgccccgaggccacctacgccggcaccgactatcgccagtcaacccctctctctgcgccccgaggcttgccggcctgcggctggtggggcggtccacacccggggcctggattttgcgtgcgatatatacatctgggcacctcttgccggcacctgcggagtgctgcttctctcactcgttattacgctgtactgctaa

SEQ ID NO: 361 - DNA, 2178 bp, Artificial Sequence
  Synthetic
  misc_feature: NK77.66_CD70_DB04_B07
atggccttaccagtgaccgccttgctcctgccgctggccttgctgctccacgccgccaggccggactacaaagacgatgacgataaaggcggtggtggctctggtggtggcggatcccaggtgcagctggtgcagtctggggctgaggtgaagaagcctggggcctcagtgaaggtttcctgcaaggcatctggatacaccttcaccaactactatatctactgggtgcgacaggcccctggacaagggcttgagtggatgggatggatcaaccccaatgacggtgcaacaaattacgcacagaagttccagggcagagtcaccatgaccagggacacgtccacgagcacagtctacatggagctgagcagcctgagatctgaggacacggccgtgtattactgtgctagagaaggcaacgattactattattatttcatggactactggggccaagggaccctggtcaccgtctcctcaggtggaggcggttcaggcggaggtggctctggcggtggcggatcggacatccagatgacccagtctccatcctccctgtctgcatctgtaggagacagagtcaccatcacttgccgggcaagtcagggcattagcaacaatttaaattggtatcagcagaaaccagggaaagcccctaagctcctgatctatcatgcatccaacttggagacgggggtcccatcaaggttcagtggcagtggatctgggacagatttcactctcaccatcagcagtctgcaacctgaagattttgcaacttactactgtcaacagagttacgacggccctatgacttttggccaggggaccaagctggagatcaaaaccacgacgccagcgccgcggccaccaacaccggcgcccaccatcgcgtcgcagcccctgtccctgcgcccagaggcgtgccggccagcggcggggggcgcagtgcacacgagggggctggacttcgcctgtgatatctacatctgggcgcccttggccgggacttgtggggtccttctcctgtcactggttatcaccctttactgccggagggaccagaggctgccccccgatgcccacaagccccctgggggaggcagtttccggacccccatccaagaggagcaggccgacgcccactccaccctggccaagatcagagtgaagttcagcaggagcgcagacgcccccgcgtaccagcagggccagaaccagctctataacgagctcaatctaggacgaagagaggagtacgatgttttggacaagagacgtggccgggaccctgagatggggggaaagccgagaaggaagaaccctcaggaaggcctgtacaatgaactgcagaaagataagatggcggaggcctacagtgagattgggatgaaaggcgagcgccggaggggcaaggggcacgatggcctttaccagggtctcagtacagccaccaaggacacctacgacgcccttcacatgcaggccctgccccctcgcggctctggcgagggaaggggttccctgcttacttgcggcgacgtcgaagagaatcccggtccgatggccctcccagtaactgccctccttttgcccctcgcactccttcttcatgccgctcgccccaactgggtcaacgtgattagcgatttgaagaaaatcgaggaccttatacagtctatgcatattgacgctacactgtatactgagagtgatgtacacccgtcctgtaaggtaacggccatgaaatgctttcttctggagctccaggtcatcagcttggagtctggggacgcaagcatccacgatacggttgaaaacctcatcatccttgcgaacaactctctctcatctaatggaaacgttacagagagtgggtgtaaggagtgcgaagagttggaagaaaaaaacatcaaagaatttcttcaatccttcgttcacatagtgcaaatgttcattaacacgtccactaccacacccgccccgaggccacctacgccggcaccgactatcgccagtcaacccctctctctgcgccccgaggcttgccggcctgcggctggtggggcggtccacacccggggcctggattttgcgtgcgatatatacatctgggcacctcttgccggcacctgcggagtgctgcttctctcactcgttattacgctgtactgctaa

SEQ ID NO: 362 - DNA, 2196 bp, Artificial Sequence
  Synthetic
  misc_feature: NK77.67_CD70_DB04_C01
atggccttaccagtgaccgccttgctcctgccgctggccttgctgctccacgccgccaggccggactacaaagacgatgacgataaaggcggtggtggctctggtggtggcggatcccaggtgcagctggtgcagtctggggctgaggtgaagaagcctgggtcctcggtgaaggtctcctgcaaggcttctggaggcaccttcagcagctatgctatcagctgggtgcgacaggcccctggacaagggcttgagtggatgggaggaatcacaccaatgtttggtacaacggactacgcacagaagttccagggcagagtcacgattaccgcggacgaatccacgagcacagcctacatggagctgagcagcctgagatctgaggacacggccgtgtattactgtgcgagagatgagcgggacggatacgccacagtggcttttgatatctggggccaagggacaatggtcaccgtctcttcaggtggaggcggttcaggcggaggtggctctggcggtggcggatcggatattgtgatgactcagtctccactctccctgcccgtcacccctggagagccggcctccatctcctgcaggtctagtcagagcctcctgcatagcaatggatacaactatttggattggtacctgcagaagccagggcagtctccacagctcctgatctatgatgcttctaatcttgagacaggggtccctgacaggttcagtggcagtggatcaggcacagattttacactgaaaatcagcagagtggaggctgaggatgttggggtttattactgcatgcaagggacgcattggcctcccacgttcggccaagggaccaaggtggaaatcaaaaccacgacgccagcgccgcggccaccaacaccggcgcccaccatcgcgtcgcagcccctgtccctgcgcccagaggcgtgccggccagcggcggggggcgcagtgcacacgagggggctggacttcgcctgtgatatctacatctgggcgcccttggccgggacttgtggggtccttctcctgtcactggttatcaccctttactgccggagggaccagaggctgccccccgatgcccacaagccccctgggggaggcagtttccggacccccatccaagaggagcaggccgacgcccactccaccctggccaagatcagagtgaagttcagcaggagcgcagacgcccccgcgtaccagcagggccagaaccagctctataacgagctcaatctaggacgaagagaggagtacgatgttttggacaagagacgtggccgggaccctgagatggggggaaagccgagaaggaagaaccctcaggaaggcctgtacaatgaactgcagaaagataagatggcggaggcctacagtgagattgggatgaaaggcgagcgccggaggggcaaggggcacgatggcctttaccagggtctcagtacagccaccaaggacacctacgacgcccttcacatgcaggccctgccccctcgcggctctggcgagggaaggggttccctgcttacttgcggcgacgtcgaagagaatcccggtccgatggccctcccagtaactgccctccttttgcccctcgcactccttcttcatgccgctcgccccaactgggtcaacgtgattagcgatttgaagaaaatcgaggaccttatacagtctatgcatattgacgctacactgtatactgagagtgatgtacacccgtcctgtaaggtaacggccatgaaatgctttcttctggagctccaggtcatcagcttggagtctggggacgcaagcatccacgatacggttgaaaacctcatcatccttgcgaacaactctctctcatctaatggaaacgttacagagagtgggtgtaaggagtgcgaagagttggaagaaaaaaacatcaaagaatttcttcaatccttcgttcacatagtgcaaatgttcattaacacgtccactaccacacccgccccgaggccacctacgccggcaccgactatcgccagtcaacccctctctctgcgccccgaggcttgccggcctgcggctggtggggcggtccacacccggggcctggattttgcgtgcgatatatacatctgggcacctcttgccggcacctgcggagtgctgcttctctcactcgttattacgctgtactgctaa

SEQ ID NO: 363 - DNA, 2181 bp, Artificial Sequence
  Synthetic
  misc_feature: NK77.68_CD70_DB04_C04
atggccttaccagtgaccgccttgctcctgccgctggccttgctgctccacgccgccaggccggactacaaagacgatgacgataaaggcggtggtggctctggtggtggcggatcccaggtgcagctggtgcagtctggggctgaggtgaagaagcctggggcctcagtgaaggtttcctgcaaggcatctggatacaccttcaccagctactatatgcactgggtgcgacaggcccctggacaagggcttgagtggatgggaataatcaaccctagtgacggaggaacaagctacgcagacaagttccagggcagagtcaccatgaccagggacacgtccacgagcacagtctacatggagctgagcagcctgagatctgaggacacggccgtgtattactgtgctagagcgcttgcccccctgggatggggtgacggcatggatgtctggggccaagggacaacagtcaccgtctcttcaggtggaggcggttcaggcggaggtggctctggcggtggcggatcggacatccagatgacccagtctccatcctccctgtctgcatctgtaggagacagagtcaccatcacttgccaggcgagtcaggacattagcaactatttaaattggtatcagcagaaaccagggaaagcccctaagctcctgatctacgatgcatccaatttggaaacaggggtcccatcaaggttcagtggaagtggatctgggacagattttactctcaccatcagcagcctgcagcctgaagatttcgcaacatattactgtcaacagtcatatgatggacctatcaccttcggccaagggacacgactggagattaaaaccacgacgccagcgccgcggccaccaacaccggcgcccaccatcgcgtcgcagcccctgtccctgcgcccagaggcgtgccggccagcggcggggggcgcagtgcacacgagggggctggacttcgcctgtgatatctacatctgggcgcccttggccgggacttgtggggtccttctcctgtcactggttatcaccctttactgccggagggaccagaggctgccccccgatgcccacaagccccctgggggaggcagtttccggacccccatccaagaggagcaggccgacgcccactccaccctggccaagatcagagtgaagttcagcaggagcgcagacgcccccgcgtaccagcagggccagaaccagctctataacgagctcaatctaggacgaagagaggagtacgatgttttggacaagagacgtggccgggaccctgagatggggggaaagccgagaaggaagaaccctcaggaaggcctgtacaatgaactgcagaaagataagatggcggaggcctacagtgagattgggatgaaaggcgagcgccggaggggcaaggggcacgatggcctttaccagggtctcagtacagccaccaaggacacctacgacgcccttcacatgcaggccctgccccctcgcggctctggcgagggaaggggttccctgcttacttgcggcgacgtcgaagagaatcccggtccgatggccctcccagtaactgccctccttttgcccctcgcactccttcttcatgccgctcgccccaactgggtcaacgtgattagcgatttgaagaaaatcgaggaccttatacagtctatgcatattgacgctacactgtatactgagagtgatgtacacccgtcctgtaaggtaacggccatgaaatgctttcttctggagctccaggtcatcagcttggagtctggggacgcaagcatccacgatacggttgaaaacctcatcatccttgcgaacaactctctctcatctaatggaaacgttacagagagtgggtgtaaggagtgcgaagagttggaagaaaaaaacatcaaagaatttcttcaatccttcgttcacatagtgcaaatgttcattaacacgtccactaccacacccgccccgaggccacctacgccggcaccgactatcgccagtcaacccctctctctgcgccccgaggcttgccggcctgcggctggtggggcggtccacacccggggcctggattttgcgtgcgatatatacatctgggcacctcttgccggcacctgcggagtgctgcttctctcactcgttattacgctgtactgctaa

SEQ ID NO: 364 - DNA, 2172 bp, Artificial Sequence
  Synthetic
  misc_feature: NK77.69_CD70_DB04_C06
atggccttaccagtgaccgccttgctcctgccgctggccttgctgctccacgccgccaggccggactacaaagacgatgacgataaaggcggtggtggctctggtggtggcggatcccaggtgcagctggtgcagtctggggctgaggtgaagaagcctgggtcctcggtgaaggtctcctgcaaggcttctggatacaccttcactagctattacatccactgggtgcgacaggcccctggacaagggcttgagtggatgggatggatgaatccctcctcaggtgttacgaacttcgcacagaagttccagggcagagtcacgattaccgcggacgaatccacgagcacagcctacatggagctgagcagcctgagatctgaggacacggccgtgtattactgtgcgagaggttcggaccagggtgactggtctgacccctggggccagggaaccctggtcaccgtctcctcaggtggaggcggttcaggcggaggtggctctggcggtggcggatcggacatccagatgacccagtctccatcctccctgtctgcatctgtaggagacagagtcaccatcacttgccgggcaagtcagagcattagcagctatttaaattggtatcagcagaaaccagggaaagcccctaagctcctgatctatgacgcatccaacttggaaacgggggtcccatcaaggttcagtggcagtggatctgggacagatttcactctcaccatcagcagtctgcaacctgaagattttgcaacttactactgtcaacagagttacaatacccctccaactttcggcggagggaccaaggtggagatcaaaaccacgacgccagcgccgcggccaccaacaccggcgcccaccatcgcgtcgcagcccctgtccctgcgcccagaggcgtgccggccagcggcggggggcgcagtgcacacgagggggctggacttcgcctgtgatatctacatctgggcgcccttggccgggacttgtggggtccttctcctgtcactggttatcaccctttactgccggagggaccagaggctgccccccgatgcccacaagccccctgggggaggcagtttccggacccccatccaagaggagcaggccgacgcccactccaccctggccaagatcagagtgaagttcagcaggagcgcagacgcccccgcgtaccagcagggccagaaccagctctataacgagctcaatctaggacgaagagaggagtacgatgttttggacaagagacgtggccgggaccctgagatggggggaaagccgagaaggaagaaccctcaggaaggcctgtacaatgaactgcagaaagataagatggcggaggcctacagtgagattgggatgaaaggcgagcgccggaggggcaaggggcacgatggcctttaccagggtctcagtacagccaccaaggacacctacgacgcccttcacatgcaggccctgccccctcgcggctctggcgagggaaggggttccctgcttacttgcggcgacgtcgaagagaatcccggtccgatggccctcccagtaactgccctccttttgcccctcgcactccttcttcatgccgctcgccccaactgggtcaacgtgattagcgatttgaagaaaatcgaggaccttatacagtctatgcatattgacgctacactgtatactgagagtgatgtacacccgtcctgtaaggtaacggccatgaaatgctttcttctggagctccaggtcatcagcttggagtctggggacgcaagcatccacgatacggttgaaaacctcatcatccttgcgaacaactctctctcatctaatggaaacgttacagagagtgggtgtaaggagtgcgaagagttggaagaaaaaaacatcaaagaatttcttcaatccttcgttcacatagtgcaaatgttcattaacacgtccactaccacacccgccccgaggccacctacgccggcaccgactatcgccagtcaacccctctctctgcgccccgaggcttgccggcctgcggctggtggggcggtccacacccggggcctggattttgcgtgcgatatatacatctgggcacctcttgccggcacctgcggagtgctgcttctctcactcgttattacgctgtactgctaa

SEQ ID NO: 365 - DNA, 2181 bp, Artificial Sequence
  Synthetic
  misc_feature: NK77.70_CD70_DB04_C07
atggccttaccagtgaccgccttgctcctgccgctggccttgctgctccacgccgccaggccggactacaaagacgatgacgataaaggcggtggtggctctggtggtggcggatcccaggtgcagctggtgcagtctggggctgaggtgaagaagcctggggcctcagtgaaggtttcctgcaaggcatctggatacaccttcaccgactcctatatacactgggtgcgacaggcccctggacaagggcttgagtggattggatggatgaaccctaatacaggtgacacaggctacgcacagaagttccagggcagagtcaccatgaccagggacacgtccacgagcacagtctacatggagctgagcagcctgagatctgaggacacggccgtgtattactgtgctaaggacgactttggagagcttgctccagccaccttcgacccctggggccagggaaccctggtcaccgtctcctcaggtggaggcggttcaggcggaggtggctctggcggtggcggatcggacatccagatgacccagtctccatcctccctgtctgcatctgtaggagacagagtcaccatcacttgccaggcaagtcaggacattagcaattatttaaattggtatcagcagaaaccagggaaagcccctaagctcctgatctatggtgcatccagtttgcaaagtggggtcccatcaaggttcagtggcagtggatctgggacagatttcactctcaccatcagcagtctgcaacctgaagattttgcaacttactactgtctgcaggatgcggcgacccctatcaccttcggccaagggacacgactggagattaaaaccacgacgccagcgccgcggccaccaacaccggcgcccaccatcgcgtcgcagcccctgtccctgcgcccagaggcgtgccggccagcggcggggggcgcagtgcacacgagggggctggacttcgcctgtgatatctacatctgggcgcccttggccgggacttgtggggtccttctcctgtcactggttatcaccctttactgccggagggaccagaggctgccccccgatgcccacaagccccctgggggaggcagtttccggacccccatccaagaggagcaggccgacgcccactccaccctggccaagatcagagtgaagttcagcaggagcgcagacgcccccgcgtaccagcagggccagaaccagctctataacgagctcaatctaggacgaagagaggagtacgatgttttggacaagagacgtggccgggaccctgagatggggggaaagccgagaaggaagaaccctcaggaaggcctgtacaatgaactgcagaaagataagatggcggaggcctacagtgagattgggatgaaaggcgagcgccggaggggcaaggggcacgatggcctttaccagggtctcagtacagccaccaaggacacctacgacgcccttcacatgcaggccctgccccctcgcggctctggcgagggaaggggttccctgcttacttgcggcgacgtcgaagagaatcccggtccgatggccctcccagtaactgccctccttttgcccctcgcactccttcttcatgccgctcgccccaactgggtcaacgtgattagcgatttgaagaaaatcgaggaccttatacagtctatgcatattgacgctacactgtatactgagagtgatgtacacccgtcctgtaaggtaacggccatgaaatgctttcttctggagctccaggtcatcagcttggagtctggggacgcaagcatccacgatacggttgaaaacctcatcatccttgcgaacaactctctctcatctaatggaaacgttacagagagtgggtgtaaggagtgcgaagagttggaagaaaaaaacatcaaagaatttcttcaatccttcgttcacatagtgcaaatgttcattaacacgtccactaccacacccgccccgaggccacctacgccggcaccgactatcgccagtcaacccctctctctgcgccccgaggcttgccggcctgcggctggtggggcggtccacacccggggcctggattttgcgtgcgatatatacatctgggcacctcttgccggcacctgcggagtgctgcttctctcactcgttattacgctgtactgctaa

SEQ ID NO: 366 - DNA, 2181 bp, Artificial Sequence
  Synthetic
  misc_feature: NK77.71_CD70_DB04_D02
atggccttaccagtgaccgccttgctcctgccgctggccttgctgctccacgccgccaggccggactacaaagacgatgacgataaaggcggtggtggctctggtggtggcggatcccaggtgcagctggtgcagtctggggctgaggtgaagaagcctggggcctcagtgaaggtttcctgcaaggcatctggatacaccttcaccagctacgacatcaattgggtgcgacaggcccctggacaagggcttgagtggatgggagtcatcagccctagtggtggtggaacaagctacgcacagaagttccagggcagagtcaccatgaccagggacacgtccacgagcacagtctacatggagctgagcagcctgagatctgaggacacggccgtgtattactgtgctagatactacggcggcaaccccgaagggtggtacttcgatctctggggccgtggcaccctggtcactgtctcctcaggtggaggcggttcaggcggaggtggctctggcggtggcggatcggacatccagatgacccagtctccatcctccctgtctgcatctgtaggagacagagtcaccatcacttgccgggcaagtcagagcattggaaattggttagcctggtatcagcagaaaccagggaaagcccctaagctcctgatctatgacgcatccgatttggaaaccggggtcccatcaaggttcagtggcagtggatctgggacagatttcactctcaccatcagcagtctgcaacctgaagattttgcaacttactactgtcaacagagttacactaccccttggacgttcggccaagggaccaaggtggaaatcaaaaccacgacgccagcgccgcggccaccaacaccggcgcccaccatcgcgtcgcagcccctgtccctgcgcccagaggcgtgccggccagcggcggggggcgcagtgcacacgagggggctggacttcgcctgtgatatctacatctgggcgcccttggccgggacttgtggggtccttctcctgtcactggttatcaccctttactgccggagggaccagaggctgccccccgatgcccacaagccccctgggggaggcagtttccggacccccatccaagaggagcaggccgacgcccactccaccctggccaagatcagagtgaagttcagcaggagcgcagacgcccccgcgtaccagcagggccagaaccagctctataacgagctcaatctaggacgaagagaggagtacgatgttttggacaagagacgtggccgggaccctgagatggggggaaagccgagaaggaagaaccctcaggaaggcctgtacaatgaactgcagaaagataagatggcggaggcctacagtgagattgggatgaaaggcgagcgccggaggggcaaggggcacgatggcctttaccagggtctcagtacagccaccaaggacacctacgacgcccttcacatgcaggccctgccccctcgcggctctggcgagggaaggggttccctgcttacttgcggcgacgtcgaagagaatcccggtccgatggccctcccagtaactgccctccttttgcccctcgcactccttcttcatgccgctcgccccaactgggtcaacgtgattagcgatttgaagaaaatcgaggaccttatacagtctatgcatattgacgctacactgtatactgagagtgatgtacacccgtcctgtaaggtaacggccatgaaatgctttcttctggagctccaggtcatcagcttggagtctggggacgcaagcatccacgatacggttgaaaacctcatcatccttgcgaacaactctctctcatctaatggaaacgttacagagagtgggtgtaaggagtgcgaagagttggaagaaaaaaacatcaaagaatttcttcaatccttcgttcacatagtgcaaatgttcattaacacgtccactaccacacccgccccgaggccacctacgccggcaccgactatcgccagtcaacccctctctctgcgccccgaggcttgccggcctgcggctggtggggcggtccacacccggggcctggattttgcgtgcgatatatacatctgggcacctcttgccggcacctgcggagtgctgcttctctcactcgttattacgctgtactgctaa

SEQ ID NO: 367 - DNA, 2226 bp, Artificial Sequence
  Synthetic
  misc_feature: NK77.72_CD70_DB04_D05
atggccttaccagtgaccgccttgctcctgccgctggccttgctgctccacgccgccaggccggactacaaagacgatgacgataaaggcggtggtggctctggtggtggcggatccgaggtgcagctgctggagtctgggggaggcctcgtccagcctgggggctccctgagactctcctgtgcagcctctggattcgttttcgatgactatgctatccactgggtccgccaggctccgggcaaggggctagagtgggtggcagcgatatcatatgatggaagtaataaatactacgcagactccgtgaagggccgattcaccatctccagagacaattccaagaacacgctgtatctgcaaatgaacagcctgagagctgaggacacggctgtgtattactgtgcgagagctccacaatattatgggagtggcaccgacccacttgaggttagatactactactacggcatggacgtgtggggccaagggaccacggtcaccgtctcctcaggtggaggcggttcaggcggaggtggctctggcggtggcggatcggatattgtgatgactcagtctccactctccctgcccgtcacccctggagagccggcctccatctcctgcaggtctagtcagagcctcttgcattctaatggctacaactatttggattggtacctgcagaagccagggcagtctccacagctcctgatctatgaagtctctaatcgggcctccggggtccctgacaggttcagtggcagtggatcaggcacagattttacactgaaaatcagcagagtggaggctgaggatgttggggtttattactgcatgaaaggcctacaaactcctctgactttcggccctgggaccaaagtggatatcaaaaccacgacgccagcgccgcggccaccaacaccggcgcccaccatcgcgtcgcagcccctgtccctgcgcccagaggcgtgccggccagcggcggggggcgcagtgcacacgagggggctggacttcgcctgtgatatctacatctgggcgcccttggccgggacttgtggggtccttctcctgtcactggttatcaccctttactgccggagggaccagaggctgccccccgatgcccacaagccccctgggggaggcagtttccggacccccatccaagaggagcaggccgacgcccactccaccctggccaagatcagagtgaagttcagcaggagcgcagacgcccccgcgtaccagcagggccagaaccagctctataacgagctcaatctaggacgaagagaggagtacgatgttttggacaagagacgtggccgggaccctgagatggggggaaagccgagaaggaagaaccctcaggaaggcctgtacaatgaactgcagaaagataagatggcggaggcctacagtgagattgggatgaaaggcgagcgccggaggggcaaggggcacgatggcctttaccagggtctcagtacagccaccaaggacacctacgacgcccttcacatgcaggccctgccccctcgcggctctggcgagggaaggggttccctgcttacttgcggcgacgtcgaagagaatcccggtccgatggccctcccagtaactgccctccttttgcccctcgcactccttcttcatgccgctcgccccaactgggtcaacgtgattagcgatttgaagaaaatcgaggaccttatacagtctatgcatattgacgctacactgtatactgagagtgatgtacacccgtcctgtaaggtaacggccatgaaatgctttcttctggagctccaggtcatcagcttggagtctggggacgcaagcatccacgatacggttgaaaacctcatcatccttgcgaacaactctctctcatctaatggaaacgttacagagagtgggtgtaaggagtgcgaagagttggaagaaaaaaacatcaaagaatttcttcaatccttcgttcacatagtgcaaatgttcattaacacgtccactaccacacccgccccgaggccacctacgccggcaccgactatcgccagtcaacccctctctctgcgccccgaggcttgccggcctgcggctggtggggcggtccacacccggggcctggattttgcgtgcgatatatacatctgggcacctcttgccggcacctgcggagtgctgcttctctcactcgttattacgctgtactgctaa

SEQ ID NO: 368 - DNA, 2181 bp, Artificial Sequence
  Synthetic
  misc_feature: NK77.73_CD70_DB04_D07
atggccttaccagtgaccgccttgctcctgccgctggccttgctgctccacgccgccaggccggactacaaagacgatgacgataaaggcggtggtggctctggtggtggcggatcccaggtgcagctggtgcagtctggggctgaggtgaagaagcctgggtcctcggtgaaggtctcctgcaaggcttctggaggcaccttccgcaattatgctatcagctgggtgcgacaggcccctggacaagggcttgagtggatgggaggtatcatccctatctttggtacagcaaactacgcacagaagttccagggcagagtcacgattaccgcggacgaatccacgagcacagcctacatggagctgagcagcctgagatctgaggacacggccgtgtattactgtgcgagagatcacagtgctgggactcaccacgacgcttttgatatctggggccaagggacaatggtcaccgtctcttcaggtggaggcggttcaggcggaggtggctctggcggtggcggatcggacatccagatgacccagtctccatcctccctgtctgcatctgtaggagacagagtcaccatcacttgccgggcaagtcagggcattagcaactatttagcctggtatcagcagaaaccagggaaagcccctaagctcctgatctatgctgcatccagtttgcaaagtggggtcccatcaaggttcagtggcagtggatctgggacagatttcactctcaccatcagcagtctgcaacctgaagattttgcaacttactactgtcaacagagtcacagtacccctctcactttcggccaagggaccaaggtggagatcaaaaccacgacgccagcgccgcggccaccaacaccggcgcccaccatcgcgtcgcagcccctgtccctgcgcccagaggcgtgccggccagcggcggggggcgcagtgcacacgagggggctggacttcgcctgtgatatctacatctgggcgcccttggccgggacttgtggggtccttctcctgtcactggttatcaccctttactgccggagggaccagaggctgccccccgatgcccacaagccccctgggggaggcagtttccggacccccatccaagaggagcaggccgacgcccactccaccctggccaagatcagagtgaagttcagcaggagcgcagacgcccccgcgtaccagcagggccagaaccagctctataacgagctcaatctaggacgaagagaggagtacgatgttttggacaagagacgtggccgggaccctgagatggggggaaagccgagaaggaagaaccctcaggaaggcctgtacaatgaactgcagaaagataagatggcggaggcctacagtgagattgggatgaaaggcgagcgccggaggggcaaggggcacgatggcctttaccagggtctcagtacagccaccaaggacacctacgacgcccttcacatgcaggccctgccccctcgcggctctggcgagggaaggggttccctgcttacttgcggcgacgtcgaagagaatcccggtccgatggccctcccagtaactgccctccttttgcccctcgcactccttcttcatgccgctcgccccaactgggtcaacgtgattagcgatttgaagaaaatcgaggaccttatacagtctatgcatattgacgctacactgtatactgagagtgatgtacacccgtcctgtaaggtaacggccatgaaatgctttcttctggagctccaggtcatcagcttggagtctggggacgcaagcatccacgatacggttgaaaacctcatcatccttgcgaacaactctctctcatctaatggaaacgttacagagagtgggtgtaaggagtgcgaagagttggaagaaaaaaacatcaaagaatttcttcaatccttcgttcacatagtgcaaatgttcattaacacgtccactaccacacccgccccgaggccacctacgccggcaccgactatcgccagtcaacccctctctctgcgccccgaggcttgccggcctgcggctggtggggcggtccacacccggggcctggattttgcgtgcgatatatacatctgggcacctcttgccggcacctgcggagtgctgcttctctcactcgttattacgctgtactgctaa

SEQ ID NO: 369 - DNA, 2166 bp, Artificial Sequence
  Synthetic
  misc_feature: NK77.74_CD70_DB04_D08
atggccttaccagtgaccgccttgctcctgccgctggccttgctgctccacgccgccaggccggactacaaagacgatgacgataaaggcggtggtggctctggtggtggcggatcccaggtgcagctggtgcagtctggggctgaggtgaagaagcctggggcctcagtgaaggtctcctgcaaggcttctggatacaccttcaccagttattatatccactgggtgcgacaggccccgggacaagggcttgagtggatgggatggatgaacccaaacagtggtaacgccggctatgcacagaagttccagggcagagtcaccatgaccagggatacctccacaagcacagtgtacatggagctgagcagcctgagatctgaggacacggccgtgtattactgtgcgagagagtactgggggagctttgactactggggccaagggaccctggtcaccgtctcctcaggtggaggcggttcaggcggaggtggctctggcggtggcggatcggacatccagatgacccagtctccatcctccctgtctgcatctgtaggagacagagtcaccatcacttgccgggcaagtcaggggattagcaataacttaaattggtatcagcagaaaccagggaaagcccctaagctcctgatctatgatgcatccaacttggaaactggggtcccatcaaggttcagtggcagtggatctgggacagatttcactctcaccatcagcagtctgcaacctgaagattttgcaacttactactgtcaacagagttacagtaccccttatacgttcggccaagggaccaaggtggaaatcaaaaccacgacgccagcgccgcggccaccaacaccggcgcccaccatcgcgtcgcagcccctgtccctgcgcccagaggcgtgccggccagcggcggggggcgcagtgcacacgagggggctggacttcgcctgtgatatctacatctgggcgcccttggccgggacttgtggggtccttctcctgtcactggttatcaccctttactgccggagggaccagaggctgccccccgatgcccacaagccccctgggggaggcagtttccggacccccatccaagaggagcaggccgacgcccactccaccctggccaagatcagagtgaagttcagcaggagcgcagacgcccccgcgtaccagcagggccagaaccagctctataacgagctcaatctaggacgaagagaggagtacgatgttttggacaagagacgtggccgggaccctgagatggggggaaagccgagaaggaagaaccctcaggaaggcctgtacaatgaactgcagaaagataagatggcggaggcctacagtgagattgggatgaaaggcgagcgccggaggggcaaggggcacgatggcctttaccagggtctcagtacagccaccaaggacacctacgacgcccttcacatgcaggccctgccccctcgcggctctggcgagggaaggggttccctgcttacttgcggcgacgtcgaagagaatcccggtccgatggccctcccagtaactgccctccttttgcccctcgcactccttcttcatgccgctcgccccaactgggtcaacgtgattagcgatttgaagaaaatcgaggaccttatacagtctatgcatattgacgctacactgtatactgagagtgatgtacacccgtcctgtaaggtaacggccatgaaatgctttcttctggagctccaggtcatcagcttggagtctggggacgcaagcatccacgatacggttgaaaacctcatcatccttgcgaacaactctctctcatctaatggaaacgttacagagagtgggtgtaaggagtgcgaagagttggaagaaaaaaacatcaaagaatttcttcaatccttcgttcacatagtgcaaatgttcattaacacgtccactaccacacccgccccgaggccacctacgccggcaccgactatcgccagtcaacccctctctctgcgccccgaggcttgccggcctgcggctggtggggcggtccacacccggggcctggattttgcgtgcgatatatacatctgggcacctcttgccggcacctgcggagtgctgcttctctcactcgttattacgctgtactgctaa

SEQ ID NO: 370 - DNA, 2169 bp, Artificial Sequence
  Synthetic
  misc_feature: NK77.75_CD70_DB04_D10
atggccttaccagtgaccgccttgctcctgccgctggccttgctgctccacgccgccaggccggactacaaagacgatgacgataaaggcggtggtggctctggtggtggcggatcccaggtgcagctggtgcagtctggggctgaggtgaagaagcctggggcctcagtgaaggtttcctgcaaggcatctggatacaccttcaccggctactatatgcactgggtgcgacaggcccctggacaagggcttgagtggatgggaatgatcgatccaagcgacggtagcacaatttacgcacagaagttccagggcagagtcaccatgaccagggacacgtccacgagcacagtctacatggagctgagcagcctgagatctgaggacacggccgtgtattactgtgctagagagcggccactgtacgcttccgacctgtggggccaagggaccctggtcaccgtctcctcaggtggaggcggttcaggcggaggtggctctggcggtggcggatcggatatccagatgacccagtctccatcctccctgtctgcatctgtaggagacagagtcaccatcacttgccgggcaagtcaggacattggaaatgatttaggctggtatcagcagaaaccagggaaagcccctaagctcctgatctatgctgcatccagtttacaaagtggggtcccatcaaggttcagcggcagtggatctggcacagatttcactctcaccatcagcagcctgcagcctgaagattttgcaacttattactgtctacaagattacgactaccctctcactttcggccaggggaccaaggtggagatcaaaaccacgacgccagcgccgcggccaccaacaccggcgcccaccatcgcgtcgcagcccctgtccctgcgcccagaggcgtgccggccagcggcggggggcgcagtgcacacgagggggctggacttcgcctgtgatatctacatctgggcgcccttggccgggacttgtggggtccttctcctgtcactggttatcaccctttactgccggagggaccagaggctgccccccgatgcccacaagccccctgggggaggcagtttccggacccccatccaagaggagcaggccgacgcccactccaccctggccaagatcagagtgaagttcagcaggagcgcagacgcccccgcgtaccagcagggccagaaccagctctataacgagctcaatctaggacgaagagaggagtacgatgttttggacaagagacgtggccgggaccctgagatggggggaaagccgagaaggaagaaccctcaggaaggcctgtacaatgaactgcagaaagataagatggcggaggcctacagtgagattgggatgaaaggcgagcgccggaggggcaaggggcacgatggcctttaccagggtctcagtacagccaccaaggacacctacgacgcccttcacatgcaggccctgccccctcgcggctctggcgagggaaggggttccctgcttacttgcggcgacgtcgaagagaatcccggtccgatggccctcccagtaactgccctccttttgcccctcgcactccttcttcatgccgctcgccccaactgggtcaacgtgattagcgatttgaagaaaatcgaggaccttatacagtctatgcatattgacgctacactgtatactgagagtgatgtacacccgtcctgtaaggtaacggccatgaaatgctttcttctggagctccaggtcatcagcttggagtctggggacgcaagcatccacgatacggttgaaaacctcatcatccttgcgaacaactctctctcatctaatggaaacgttacagagagtgggtgtaaggagtgcgaagagttggaagaaaaaaacatcaaagaatttcttcaatccttcgttcacatagtgcaaatgttcattaacacgtccactaccacacccgccccgaggccacctacgccggcaccgactatcgccagtcaacccctctctctgcgccccgaggcttgccggcctgcggctggtggggcggtccacacccggggcctggattttgcgtgcgatatatacatctgggcacctcttgccggcacctgcggagtgctgcttctctcactcgttattacgctgtactgctaa

SEQ ID NO: 371 - DNA, 2172 bp, Artificial Sequence
  Synthetic
  misc_feature: NK77.85_CD70_DB03_B02
atggccttaccagtgaccgccttgctcctgccgctggccttgctgctccacgccgccaggccggactacaaagacgatgacgataaaggcggtggtggctctggtggtggcggatcccaggtgcagctggtgcagtctggggctgaggtgaagaagcctgggtcttcagtgaaggtttcctgcaaggcatctggatacaccttcaccaactactatatgcactgggtgcgacaggcccctggacaagggcttgagtggatgggatggatgaaccccgatagtggtaatacagggtacgcacagaagttccagggcagagtcaccatcaccgctgacgaatccacgagcacagcctacatggagctgagcagcctgagatctgaggacacggccgtgtattactgtgctagaagtagcagctcctggcctgacttcgatctctggggccgtggcaccctggtcactgtctcctcaggtggaggcggttcaggcggaggtggctctggcggtggcggatcggacatccagatgacccagtctccatcctccctgtctgcatctgtaggagacagagtcaccatcacttgccgggcaagtcagagcattagcagctatttaaattggtatcagcagaaaccagggaaagcccctaagctcctgatctatgatgcatccaacttggagactggggtcccatcaaggttcagtggcagtggatctgggacagatttcactctcaccatcagcagtctgcaacctgaagattttgcaacttactactgtcaacagagttacaacaccccttacagttttggccaggggaccaaggtggagatcaaaaccacgacgccagcgccgcggccaccaacaccggcgcccaccatcgcgtcgcagcccctgtccctgcgcccagaggcgtgccggccagcggcggggggcgcagtgcacacgagggggctggacttcgcctgtgatatctacatctgggcgcccttggccgggacttgtggggtccttctcctgtcactggttatcaccctttactgccggagggaccagaggctgccccccgatgcccacaagccccctgggggaggcagtttccggacccccatccaagaggagcaggccgacgcccactccaccctggccaagatcagagtgaagttcagcaggagcgcagacgcccccgcgtaccagcagggccagaaccagctctataacgagctcaatctaggacgaagagaggagtacgatgttttggacaagagacgtggccgggaccctgagatggggggaaagccgagaaggaagaaccctcaggaaggcctgtacaatgaactgcagaaagataagatggcggaggcctacagtgagattgggatgaaaggcgagcgccggaggggcaaggggcacgatggcctttaccagggtctcagtacagccaccaaggacacctacgacgcccttcacatgcaggccctgccccctcgcggctctggcgagggaaggggttccctgcttacttgcggcgacgtcgaagagaatcccggtccgatggccctcccagtaactgccctccttttgcccctcgcactccttcttcatgccgctcgccccaactgggtcaacgtgattagcgatttgaagaaaatcgaggaccttatacagtctatgcatattgacgctacactgtatactgagagtgatgtacacccgtcctgtaaggtaacggccatgaaatgctttcttctggagctccaggtcatcagcttggagtctggggacgcaagcatccacgatacggttgaaaacctcatcatccttgcgaacaactctctctcatctaatggaaacgttacagagagtgggtgtaaggagtgcgaagagttggaagaaaaaaacatcaaagaatttcttcaatccttcgttcacatagtgcaaatgttcattaacacgtccactaccacacccgccccgaggccacctacgccggcaccgactatcgccagtcaacccctctctctgcgccccgaggcttgccggcctgcggctggtggggcggtccacacccggggcctggattttgcgtgcgatatatacatctgggcacctcttgccggcacctgcggagtgctgcttctctcactcgttattacgctgtactgctaa

SEQ ID NO: 372 - DNA, 2175 bp, Artificial Sequence
  Synthetic
  misc_feature: NK77.86_CD70_DB04_A06
atggccttaccagtgaccgccttgctcctgccgctggccttgctgctccacgccgccaggccggactacaaagacgatgacgataaaggcggtggtggctctggtggtggcggatcccaggtccaactcgtacaatccggcgcagaagtcaaaaaacccggcgcaagcgtcaaggtatcatgtaaagctagcgggtatacatttacatcctattccatgcattgggtacgccaagctccaggccagggcctggaatgggtcggtatcattaatcccagttccggctctgccagttatgcgcaaaaatttcaaggaagggtgacaatgactcgagataccagtacctccactgtgtatatggaactgtcctcactaaggagcgaagatactgctgtatactactgcgcacgcgaacgtggggcctatagtagtaccttcgactattggggtcagggcacgttagtgacagtgtcttccggtggaggcggttcaggcggaggtggctctggcggtggcggatcggacatccagatgacccagtctccatcctccctgtctgcatctgtaggagacagagtcaccatcacttgccggacaagtcagagcattagcagctatttaaattggtatcagcagaaaccagggaaagcccctaagctcctgatctatgacgcatccaatttggaaaccggggtcccatcaaggttcagtggcagtggatctgggacagatttcactctcaccatcagcagtctgcaacctgaagattttgcaacttactactgtcttcaggactacagttaccctctcactttcggccaagggaccaaggtggagatcaaaaccacgacgccagcgccgcggccaccaacaccggcgcccaccatcgcgtcgcagcccctgtccctgcgcccagaggcgtgccggccagcggcggggggcgcagtgcacacgagggggctggacttcgcctgtgatatctacatctgggcgcccttggccgggacttgtggggtccttctcctgtcactggttatcaccctttactgccggagggaccagaggctgccccccgatgcccacaagccccctgggggaggcagtttccggacccccatccaagaggagcaggccgacgcccactccaccctggccaagatcagagtgaagttcagcaggagcgcagacgcccccgcgtaccagcagggccagaaccagctctataacgagctcaatctaggacgaagagaggagtacgatgttttggacaagagacgtggccgggaccctgagatggggggaaagccgagaaggaagaaccctcaggaaggcctgtacaatgaactgcagaaagataagatggcggaggcctacagtgagattgggatgaaaggcgagcgccggaggggcaaggggcacgatggcctttaccagggtctcagtacagccaccaaggacacctacgacgcccttcacatgcaggccctgccccctcgcggctctggcgagggaaggggttccctgcttacttgcggcgacgtcgaagagaatcccggtccgatggccctcccagtaactgccctccttttgcccctcgcactccttcttcatgccgctcgccccaactgggtcaacgtgattagcgatttgaagaaaatcgaggaccttatacagtctatgcatattgacgctacactgtatactgagagtgatgtacacccgtcctgtaaggtaacggccatgaaatgctttcttctggagctccaggtcatcagcttggagtctggggacgcaagcatccacgatacggttgaaaacctcatcatccttgcgaacaactctctctcatctaatggaaacgttacagagagtgggtgtaaggagtgcgaagagttggaagaaaaaaacatcaaagaatttcttcaatccttcgttcacatagtgcaaatgttcattaacacgtccactaccacacccgccccgaggccacctacgccggcaccgactatcgccagtcaacccctctctctgcgccccgaggcttgccggcctgcggctggtggggcggtccacacccggggcctggattttgcgtgcgatatatacatctgggcacctcttgccggcacctgcggagtgctgcttctctcactcgttattacgctgtactgctaa

SEQ ID NO: 373 - DNA, 2175 bp, Artificial Sequence
  Synthetic
  misc_feature: NK77.87_CD70_DB04_A09
atggccttaccagtgaccgccttgctcctgccgctggccttgctgctccacgccgccaggccggactacaaagacgatgacgataaaggcggtggtggctctggtggtggcggatcccaggtgcagctggtgcagtctggggctgaggtgaagaagcctggggcctcagtgaaggtttcctgcaaggcatctggatacaccttcaccgactactatatgcactgggtgcgacaggcccctggacaagggcttgagtggatgggagtcatcaacccctctgatggtacagctcattacgcacagcggctgcagggcagagtcaccatgaccagggacacgtccacgagcacagtctacatggagctgagcagcctgagatctgaggacacggccgtgtattactgtgctagagacagcggatcttactacgctgactttgactactggggccaagggaccctggtcaccgtctcctcaggtggaggcggttcaggcggaggtggctctggcggtggcggatcggacatccagatgacccagtctccatcctccctgtctgcatctgtaggagacagagtcaccatcacttgccaggcaagtcaggacattagcaattatttaaattggtatcagcagaaaccagggaaagcccctaagctcctgatctatgatgcatccagtttgcaaagtggggtcccatcaaggttcagtggcagtggatctgggacagatttcactctcaccatcagcagtctgcaacctgaagattttgcaacttactactgtcaacagagttacagtacccctcccgccttcggccaagggaccaaggtggaaatcaaaaccacgacgccagcgccgcggccaccaacaccggcgcccaccatcgcgtcgcagcccctgtccctgcgcccagaggcgtgccggccagcggcggggggcgcagtgcacacgagggggctggacttcgcctgtgatatctacatctgggcgcccttggccgggacttgtggggtccttctcctgtcactggttatcaccctttactgccggagggaccagaggctgccccccgatgcccacaagccccctgggggaggcagtttccggacccccatccaagaggagcaggccgacgcccactccaccctggccaagatcagagtgaagttcagcaggagcgcagacgcccccgcgtaccagcagggccagaaccagctctataacgagctcaatctaggacgaagagaggagtacgatgttttggacaagagacgtggccgggaccctgagatggggggaaagccgagaaggaagaaccctcaggaaggcctgtacaatgaactgcagaaagataagatggcggaggcctacagtgagattgggatgaaaggcgagcgccggaggggcaaggggcacgatggcctttaccagggtctcagtacagccaccaaggacacctacgacgcccttcacatgcaggccctgccccctcgcggctctggcgagggaaggggttccctgcttacttgcggcgacgtcgaagagaatcccggtccgatggccctcccagtaactgccctccttttgcccctcgcactccttcttcatgccgctcgccccaactgggtcaacgtgattagcgatttgaagaaaatcgaggaccttatacagtctatgcatattgacgctacactgtatactgagagtgatgtacacccgtcctgtaaggtaacggccatgaaatgctttcttctggagctccaggtcatcagcttggagtctggggacgcaagcatccacgatacggttgaaaacctcatcatccttgcgaacaactctctctcatctaatggaaacgttacagagagtgggtgtaaggagtgcgaagagttggaagaaaaaaacatcaaagaatttcttcaatccttcgttcacatagtgcaaatgttcattaacacgtccactaccacacccgccccgaggccacctacgccggcaccgactatcgccagtcaacccctctctctgcgccccgaggcttgccggcctgcggctggtggggcggtccacacccggggcctggattttgcgtgcgatatatacatctgggcacctcttgccggcacctgcggagtgctgcttctctcactcgttattacgctgtactgctaa

SEQ ID NO: 374 - DNA, 2970 bp, Artificial Sequence
  Synthetic
  misc_feature: NK77.76_38-38
atggccttaccagtgaccgccttgctcctgccgctggccttgctgctccacgccgccaggccggactacaaagacgatgacgataaaggcggtggtggctctggtggtggcggatcccaggtgcagctggtgcagtctggggctgaggtgaagaagcctggggcctcagtgaaggtttcctgcaaggcatctggatacagtttcaccagctactatatgcactgggtgcgacaggcccctggacaagggcttgagtggatgggaataatcaaccctagtggtgggactacaagctacgcacagaagttccagggcagagtcaccatgaccagggacacgtccacgagcacagtctacatggagctgagcagcctgagatctgaggacacggccgtgtattactgtgctagagacaattccccgtatagctcaagctggtgggactactttgactactggggccaagggaccctggtcaccgtctcctcaggtggaggcggttcaggcggaggtggctctggcggtggcggatcggacatccagatgacccagtctccatcctccctgtctgcatctgtaggagacagagtcaccatcacttgccgggcaagtcaggacattcggcattatttagcatggtatcagcagaaaccagggaaagcccctaagctcctgatctatgacgcatccagtttgcaaagtggggtcccatcaaggttcagtggcagtggatctgggacagatttcactctcaccatcagcagtctgcaacctgaagattttgcaacttactactgtcaacagacctacgacgcacctatcaccttcggccaagggacacgactggagattaaaggtggcggtggctcgggcggtggtgggtcgggtggcggcggatctcaggtgcagctggtgcagtctggggctgaggtgaagaagcctggggcctcagtgaaggtttcctgcaaggcatctggatacagtttcaccagctactatatgcactgggtgcgacaggcccctggacaagggcttgagtggatgggaataatcaaccctagtggtgggactacaagctacgcacagaagttccagggcagagtcaccatgaccagggacacgtccacgagcacagtctacatggagctgagcagcctgagatctgaggacacggccgtgtattactgtgctagagacaattccccgtatagctcaagctggtgggactactttgactactggggccaagggaccctggtcaccgtctcctcaggtggaggcggttcaggcggaggtggctctggcggtggcggatcggacatccagatgacccagtctccatcctccctgtctgcatctgtaggagacagagtcaccatcacttgccgggcaagtcaggacattcggcattatttagcatggtatcagcagaaaccagggaaagcccctaagctcctgatctatgacgcatccagtttgcaaagtggggtcccatcaaggttcagtggcagtggatctgggacagatttcactctcaccatcagcagtctgcaacctgaagattttgcaacttactactgtcaacagacctacgacgcacctatcaccttcggccaagggacacgactggagattaaaaccacgacgccagcgccgcggccaccaacaccggcgcccaccatcgcgtcgcagcccctgtccctgcgcccagaggcgtgccggccagcggcggggggcgcagtgcacacgagggggctggacttcgcctgtgatatctacatctgggcgcccttggccgggacttgtggggtccttctcctgtcactggttatcaccctttactgccggagggaccagaggctgccccccgatgcccacaagccccctgggggaggcagtttccggacccccatccaagaggagcaggccgacgcccactccaccctggccaagatcagagtgaagttcagcaggagcgcagacgcccccgcgtaccagcagggccagaaccagctctataacgagctcaatctaggacgaagagaggagtacgatgttttggacaagagacgtggccgggaccctgagatggggggaaagccgagaaggaagaaccctcaggaaggcctgtacaatgaactgcagaaagataagatggcggaggcctacagtgagattgggatgaaaggcgagcgccggaggggcaaggggcacgatggcctttaccagggtctcagtacagccaccaaggacacctacgacgcccttcacatgcaggccctgccccctcgcggctctggcgagggaaggggttccctgcttacttgcggcgacgtcgaagagaatcccggtccgatggccctcccagtaactgccctccttttgcccctcgcactccttcttcatgccgctcgccccaactgggtcaacgtgattagcgatttgaagaaaatcgaggaccttatacagtctatgcatattgacgctacactgtatactgagagtgatgtacacccgtcctgtaaggtaacggccatgaaatgctttcttctggagctccaggtcatcagcttggagtctggggacgcaagcatccacgatacggttgaaaacctcatcatccttgcgaacaactctctctcatctaatggaaacgttacagagagtgggtgtaaggagtgcgaagagttggaagaaaaaaacatcaaagaatttcttcaatccttcgttcacatagtgcaaatgttcattaacacgtccactaccacacccgccccgaggccacctacgccggcaccgactatcgccagtcaacccctctctctgcgccccgaggcttgccggcctgcggctggtggggcggtccacacccggggcctggattttgcgtgcgatatatacatctgggcacctcttgccggcacctgcggagtgctgcttctctcactcgttattacgctgtactgctaa

SEQ ID NO: 375 - DNA, 2970 bp, Artificial Sequence
  Synthetic
  misc_feature: NK77.77_64-64
atggccttaccagtgaccgccttgctcctgccgctggccttgctgctccacgccgccaggccggactacaaagacgatgacgataaaggcggtggtggctctggtggtggcggatcccaggtgcagctggtgcagtctggggctgaggtgaagaagcctgggtcctcggtgaaggtctcctgcaaggcttctggatacaccttcaccagctatggaatcagctgggtgcgacaggcccctggacaagggcttgagtggatgggaggtatcatccctatctttggtacaacgaactacgcacagaagttccagggcagagtcacgattaccgcggacgaatccacgagcacagcctacatggagctgagcagcctgagatctgaggacacggccgtgtattactgtgcgagagatcatagcggcgatgggtacttcgatctctggggccgtggcaccctggtcactgtctcctcaggtggaggcggttcaggcggaggtggctctggcggtggcggatcggatattgtgatgactcagtctccactctccctgcccgtcacccctggagagccggcctccatctcctgcaggtctagtcagagcctcctgcactccaacggatacaactatttggattggtacctgcagaagccagggcagtctccacagctcctgatctatgatgcctcttcacttcagtccggggtccctgacaggttcagtggcagtggatcaggcacagattttacactgaaaatcagcagagtggaggctgaggatgttggggtttattactgcatgcaaggaacacactggcctcccacgttcggccaagggaccaaggtggaaatcaaaggtggcggtggctcgggcggtggtgggtcgggtggcggcggatctcaggtgcagctggtgcagtctggggctgaggtgaagaagcctgggtcctcggtgaaggtctcctgcaaggcttctggatacaccttcaccagctatggaatcagctgggtgcgacaggcccctggacaagggcttgagtggatgggaggtatcatccctatctttggtacaacgaactacgcacagaagttccagggcagagtcacgattaccgcggacgaatccacgagcacagcctacatggagctgagcagcctgagatctgaggacacggccgtgtattactgtgcgagagatcatagcggcgatgggtacttcgatctctggggccgtggcaccctggtcactgtctcctcaggtggaggcggttcaggcggaggtggctctggcggtggcggatcggatattgtgatgactcagtctccactctccctgcccgtcacccctggagagccggcctccatctcctgcaggtctagtcagagcctcctgcactccaacggatacaactatttggattggtacctgcagaagccagggcagtctccacagctcctgatctatgatgcctcttcacttcagtccggggtccctgacaggttcagtggcagtggatcaggcacagattttacactgaaaatcagcagagtggaggctgaggatgttggggtttattactgcatgcaaggaacacactggcctcccacgttcggccaagggaccaaggtggaaatcaaaaccacgacgccagcgccgcggccaccaacaccggcgcccaccatcgcgtcgcagcccctgtccctgcgcccagaggcgtgccggccagcggcggggggcgcagtgcacacgagggggctggacttcgcctgtgatatctacatctgggcgcccttggccgggacttgtggggtccttctcctgtcactggttatcaccctttactgccggagggaccagaggctgccccccgatgcccacaagccccctgggggaggcagtttccggacccccatccaagaggagcaggccgacgcccactccaccctggccaagatcagagtgaagttcagcaggagcgcagacgcccccgcgtaccagcagggccagaaccagctctataacgagctcaatctaggacgaagagaggagtacgatgttttggacaagagacgtggccgggaccctgagatggggggaaagccgagaaggaagaaccctcaggaaggcctgtacaatgaactgcagaaagataagatggcggaggcctacagtgagattgggatgaaaggcgagcgccggaggggcaaggggcacgatggcctttaccagggtctcagtacagccaccaaggacacctacgacgcccttcacatgcaggccctgccccctcgcggctctggcgagggaaggggttccctgcttacttgcggcgacgtcgaagagaatcccggtccgatggccctcccagtaactgccctccttttgcccctcgcactccttcttcatgccgctcgccccaactgggtcaacgtgattagcgatttgaagaaaatcgaggaccttatacagtctatgcatattgacgctacactgtatactgagagtgatgtacacccgtcctgtaaggtaacggccatgaaatgctttcttctggagctccaggtcatcagcttggagtctggggacgcaagcatccacgatacggttgaaaacctcatcatccttgcgaacaactctctctcatctaatggaaacgttacagagagtgggtgtaaggagtgcgaagagttggaagaaaaaaacatcaaagaatttcttcaatccttcgttcacatagtgcaaatgttcattaacacgtccactaccacacccgccccgaggccacctacgccggcaccgactatcgccagtcaacccctctctctgcgccccgaggcttgccggcctgcggctggtggggcggtccacacccggggcctggattttgcgtgcgatatatacatctgggcacctcttgccggcacctgcggagtgctgcttctctcactcgttattacgctgtactgctaa

SEQ ID NO: 376 - DNA, 2934 bp, Artificial Sequence
  Synthetic
  misc_feature: NK77.78_65-65
atggccttaccagtgaccgccttgctcctgccgctggccttgctgctccacgccgccaggccggactacaaagacgatgacgataaaggcggtggtggctctggtggtggcggatcccaggtgcagctggtgcagtctggggctgaggtgaagaagcctggggcctcagtgaaggtctcctgcaaggcttctggatacaccttcaccgagaatgagatgcactgggtgcgacaggcccctggacaagggcttgagtggatgggatggatcaacccgaacagtggtggcacaaactatgcacagaagtttcagggcagggtcaccatgaccagggacacgtccactagcacagtgtacatggagctgagctctctgagatctgaagacacggccgtgtattactgtgcggggagctggggtggttactactttgactactggggccaagggaccctggtcaccgtctcctcaggtggaggcggttcaggcggaggtggctctggcggtggcggatcggacatccagatgacccagtctccatcctccctgtctgcatctgtaggagacagagtcaccatcacttgccgggcaagtcagagcgttagcagatatttaaattggtatcagcagaaaccagggaaagcccctaagctcctgatctatgatgcatccaatttggaaaccggggtcccatcaaggttcagtggcagtggatctgggacagatttcactctcaccatcagcagtctgcaacctgaagattttgcaacttactactgtcaacaggccgacagtttccctgtgacttttggccaggggaccaagctggagatcaaaggtggcggtggctcgggcggtggtgggtcgggtggcggcggatctcaggtgcagctggtgcagtctggggctgaggtgaagaagcctggggcctcagtgaaggtctcctgcaaggcttctggatacaccttcaccgagaatgagatgcactgggtgcgacaggcccctggacaagggcttgagtggatgggatggatcaacccgaacagtggtggcacaaactatgcacagaagtttcagggcagggtcaccatgaccagggacacgtccactagcacagtgtacatggagctgagctctctgagatctgaagacacggccgtgtattactgtgcggggagctggggtggttactactttgactactggggccaagggaccctggtcaccgtctcctcaggtggaggcggttcaggcggaggtggctctggcggtggcggatcggacatccagatgacccagtctccatcctccctgtctgcatctgtaggagacagagtcaccatcacttgccgggcaagtcagagcgttagcagatatttaaattggtatcagcagaaaccagggaaagcccctaagctcctgatctatgatgcatccaatttggaaaccggggtcccatcaaggttcagtggcagtggatctgggacagatttcactctcaccatcagcagtctgcaacctgaagattttgcaacttactactgtcaacaggccgacagtttccctgtgacttttggccaggggaccaagctggagatcaaaaccacgacgccagcgccgcggccaccaacaccggcgcccaccatcgcgtcgcagcccctgtccctgcgcccagaggcgtgccggccagcggcggggggcgcagtgcacacgagggggctggacttcgcctgtgatatctacatctgggcgcccttggccgggacttgtggggtccttctcctgtcactggttatcaccctttactgccggagggaccagaggctgccccccgatgcccacaagccccctgggggaggcagtttccggacccccatccaagaggagcaggccgacgcccactccaccctggccaagatcagagtgaagttcagcaggagcgcagacgcccccgcgtaccagcagggccagaaccagctctataacgagctcaatctaggacgaagagaggagtacgatgttttggacaagagacgtggccgggaccctgagatggggggaaagccgagaaggaagaaccctcaggaaggcctgtacaatgaactgcagaaagataagatggcggaggcctacagtgagattgggatgaaaggcgagcgccggaggggcaaggggcacgatggcctttaccagggtctcagtacagccaccaaggacacctacgacgcccttcacatgcaggccctgccccctcgcggctctggcgagggaaggggttccctgcttacttgcggcgacgtcgaagagaatcccggtccgatggccctcccagtaactgccctccttttgcccctcgcactccttcttcatgccgctcgccccaactgggtcaacgtgattagcgatttgaagaaaatcgaggaccttatacagtctatgcatattgacgctacactgtatactgagagtgatgtacacccgtcctgtaaggtaacggccatgaaatgctttcttctggagctccaggtcatcagcttggagtctggggacgcaagcatccacgatacggttgaaaacctcatcatccttgcgaacaactctctctcatctaatggaaacgttacagagagtgggtgtaaggagtgcgaagagttggaagaaaaaaacatcaaagaatttcttcaatccttcgttcacatagtgcaaatgttcattaacacgtccactaccacacccgccccgaggccacctacgccggcaccgactatcgccagtcaacccctctctctgcgccccgaggcttgccggcctgcggctggtggggcggtccacacccggggcctggattttgcgtgcgatatatacatctgggcacctcttgccggcacctgcggagtgctgcttctctcactcgttattacgctgtactgctaa

SEQ ID NO: 377 - DNA, 2979 bp, Artificial Sequence
  Synthetic
  misc_feature: NK77.79_38-67
atggccttaccagtgaccgccttgctcctgccgctggccttgctgctccacgccgccaggccggactacaaagacgatgacgataaaggcggtggtggctctggtggtggcggatcccaggtgcagctggtgcagtctggggctgaggtgaagaagcctggggcctcagtgaaggtttcctgcaaggcatctggatacagtttcaccagctactatatgcactgggtgcgacaggcccctggacaagggcttgagtggatgggaataatcaaccctagtggtgggactacaagctacgcacagaagttccagggcagagtcaccatgaccagggacacgtccacgagcacagtctacatggagctgagcagcctgagatctgaggacacggccgtgtattactgtgctagagacaattccccgtatagctcaagctggtgggactactttgactactggggccaagggaccctggtcaccgtctcctcaggtggaggcggttcaggcggaggtggctctggcggtggcggatcggacatccagatgacccagtctccatcctccctgtctgcatctgtaggagacagagtcaccatcacttgccgggcaagtcaggacattcggcattatttagcatggtatcagcagaaaccagggaaagcccctaagctcctgatctatgacgcatccagtttgcaaagtggggtcccatcaaggttcagtggcagtggatctgggacagatttcactctcaccatcagcagtctgcaacctgaagattttgcaacttactactgtcaacagacctacgacgcacctatcaccttcggccaagggacacgactggagattaaaggtggcggtggctcgggcggtggtgggtcgggtggcggcggatctcaggtgcagctggtgcagtctggggctgaggtgaagaagcctgggtcctcggtgaaggtctcctgcaaggcttctggaggcaccttcagcagctatgctatcagctgggtgcgacaggcccctggacaagggcttgagtggatgggaggaatcacaccaatgtttggtacaacggactacgcacagaagttccagggcagagtcacgattaccgcggacgaatccacgagcacagcctacatggagctgagcagcctgagatctgaggacacggccgtgtattactgtgcgagagatgagcgggacggatacgccacagtggcttttgatatctggggccaagggacaatggtcaccgtctcttcaggtggaggcggttcaggcggaggtggctctggcggtggcggatcggatattgtgatgactcagtctccactctccctgcccgtcacccctggagagccggcctccatctcctgcaggtctagtcagagcctcctgcatagcaatggatacaactatttggattggtacctgcagaagccagggcagtctccacagctcctgatctatgatgcttctaatcttgagacaggggtccctgacaggttcagtggcagtggatcaggcacagattttacactgaaaatcagcagagtggaggctgaggatgttggggtttattactgcatgcaagggacgcattggcctcccacgttcggccaagggaccaaggtggaaatcaaaaccacgacgccagcgccgcggccaccaacaccggcgcccaccatcgcgtcgcagcccctgtccctgcgcccagaggcgtgccggccagcggcggggggcgcagtgcacacgagggggctggacttcgcctgtgatatctacatctgggcgcccttggccgggacttgtggggtccttctcctgtcactggttatcaccctttactgccggagggaccagaggctgccccccgatgcccacaagccccctgggggaggcagtttccggacccccatccaagaggagcaggccgacgcccactccaccctggccaagatcagagtgaagttcagcaggagcgcagacgcccccgcgtaccagcagggccagaaccagctctataacgagctcaatctaggacgaagagaggagtacgatgttttggacaagagacgtggccgggaccctgagatggggggaaagccgagaaggaagaaccctcaggaaggcctgtacaatgaactgcagaaagataagatggcggaggcctacagtgagattgggatgaaaggcgagcgccggaggggcaaggggcacgatggcctttaccagggtctcagtacagccaccaaggacacctacgacgcccttcacatgcaggccctgccccctcgcggctctggcgagggaaggggttccctgcttacttgcggcgacgtcgaagagaatcccggtccgatggccctcccagtaactgccctccttttgcccctcgcactccttcttcatgccgctcgccccaactgggtcaacgtgattagcgatttgaagaaaatcgaggaccttatacagtctatgcatattgacgctacactgtatactgagagtgatgtacacccgtcctgtaaggtaacggccatgaaatgctttcttctggagctccaggtcatcagcttggagtctggggacgcaagcatccacgatacggttgaaaacctcatcatccttgcgaacaactctctctcatctaatggaaacgttacagagagtgggtgtaaggagtgcgaagagttggaagaaaaaaacatcaaagaatttcttcaatccttcgttcacatagtgcaaatgttcattaacacgtccactaccacacccgccccgaggccacctacgccggcaccgactatcgccagtcaacccctctctctgcgccccgaggcttgccggcctgcggctggtggggcggtccacacccggggcctggattttgcgtgcgatatatacatctgggcacctcttgccggcacctgcggagtgctgcttctctcactcgttattacgctgtactgctaa

SEQ ID NO: 378 - DNA, 2964 bp, Artificial Sequence
  Synthetic
  misc_feature: NK77.80_38-68
atggccttaccagtgaccgccttgctcctgccgctggccttgctgctccacgccgccaggccggactacaaagacgatgacgataaaggcggtggtggctctggtggtggcggatcccaggtgcagctggtgcagtctggggctgaggtgaagaagcctggggcctcagtgaaggtttcctgcaaggcatctggatacagtttcaccagctactatatgcactgggtgcgacaggcccctggacaagggcttgagtggatgggaataatcaaccctagtggtgggactacaagctacgcacagaagttccagggcagagtcaccatgaccagggacacgtccacgagcacagtctacatggagctgagcagcctgagatctgaggacacggccgtgtattactgtgctagagacaattccccgtatagctcaagctggtgggactactttgactactggggccaagggaccctggtcaccgtctcctcaggtggaggcggttcaggcggaggtggctctggcggtggcggatcggacatccagatgacccagtctccatcctccctgtctgcatctgtaggagacagagtcaccatcacttgccgggcaagtcaggacattcggcattatttagcatggtatcagcagaaaccagggaaagcccctaagctcctgatctatgacgcatccagtttgcaaagtggggtcccatcaaggttcagtggcagtggatctgggacagatttcactctcaccatcagcagtctgcaacctgaagattttgcaacttactactgtcaacagacctacgacgcacctatcaccttcggccaagggacacgactggagattaaaggtggcggtggctcgggcggtggtgggtcgggtggcggcggatctcaggtgcagctggtgcagtctggggctgaggtgaagaagcctggggcctcagtgaaggtttcctgcaaggcatctggatacaccttcaccagctactatatgcactgggtgcgacaggcccctggacaagggcttgagtggatgggaataatcaaccctagtgacggaggaacaagctacgcagacaagttccagggcagagtcaccatgaccagggacacgtccacgagcacagtctacatggagctgagcagcctgagatctgaggacacggccgtgtattactgtgctagagcgcttgcccccctgggatggggtgacggcatggatgtctggggccaagggacaacagtcaccgtctcttcaggtggaggcggttcaggcggaggtggctctggcggtggcggatcggacatccagatgacccagtctccatcctccctgtctgcatctgtaggagacagagtcaccatcacttgccaggcgagtcaggacattagcaactatttaaattggtatcagcagaaaccagggaaagcccctaagctcctgatctacgatgcatccaatttggaaacaggggtcccatcaaggttcagtggaagtggatctgggacagattttactctcaccatcagcagcctgcagcctgaagatttcgcaacatattactgtcaacagtcatatgatggacctatcaccttcggccaagggacacgactggagattaaaaccacgacgccagcgccgcggccaccaacaccggcgcccaccatcgcgtcgcagcccctgtccctgcgcccagaggcgtgccggccagcggcggggggcgcagtgcacacgagggggctggacttcgcctgtgatatctacatctgggcgcccttggccgggacttgtggggtccttctcctgtcactggttatcaccctttactgccggagggaccagaggctgccccccgatgcccacaagccccctgggggaggcagtttccggacccccatccaagaggagcaggccgacgcccactccaccctggccaagatcagagtgaagttcagcaggagcgcagacgcccccgcgtaccagcagggccagaaccagctctataacgagctcaatctaggacgaagagaggagtacgatgttttggacaagagacgtggccgggaccctgagatggggggaaagccgagaaggaagaaccctcaggaaggcctgtacaatgaactgcagaaagataagatggcggaggcctacagtgagattgggatgaaaggcgagcgccggaggggcaaggggcacgatggcctttaccagggtctcagtacagccaccaaggacacctacgacgcccttcacatgcaggccctgccccctcgcggctctggcgagggaaggggttccctgcttacttgcggcgacgtcgaagagaatcccggtccgatggccctcccagtaactgccctccttttgcccctcgcactccttcttcatgccgctcgccccaactgggtcaacgtgattagcgatttgaagaaaatcgaggaccttatacagtctatgcatattgacgctacactgtatactgagagtgatgtacacccgtcctgtaaggtaacggccatgaaatgctttcttctggagctccaggtcatcagcttggagtctggggacgcaagcatccacgatacggttgaaaacctcatcatccttgcgaacaactctctctcatctaatggaaacgttacagagagtgggtgtaaggagtgcgaagagttggaagaaaaaaacatcaaagaatttcttcaatccttcgttcacatagtgcaaatgttcattaacacgtccactaccacacccgccccgaggccacctacgccggcaccgactatcgccagtcaacccctctctctgcgccccgaggcttgccggcctgcggctggtggggcggtccacacccggggcctggattttgcgtgcgatatatacatctgggcacctcttgccggcacctgcggagtgctgcttctctcactcgttattacgctgtactgctaa

SEQ ID NO: 379 - DNA, 2979 bp, Artificial Sequence
  Synthetic
  misc_feature: NK77.81_64-67
atggccttaccagtgaccgccttgctcctgccgctggccttgctgctccacgccgccaggccggactacaaagacgatgacgataaaggcggtggtggctctggtggtggcggatcccaggtgcagctggtgcagtctggggctgaggtgaagaagcctgggtcctcggtgaaggtctcctgcaaggcttctggatacaccttcaccagctatggaatcagctgggtgcgacaggcccctggacaagggcttgagtggatgggaggtatcatccctatctttggtacaacgaactacgcacagaagttccagggcagagtcacgattaccgcggacgaatccacgagcacagcctacatggagctgagcagcctgagatctgaggacacggccgtgtattactgtgcgagagatcatagcggcgatgggtacttcgatctctggggccgtggcaccctggtcactgtctcctcaggtggaggcggttcaggcggaggtggctctggcggtggcggatcggatattgtgatgactcagtctccactctccctgcccgtcacccctggagagccggcctccatctcctgcaggtctagtcagagcctcctgcactccaacggatacaactatttggattggtacctgcagaagccagggcagtctccacagctcctgatctatgatgcctcttcacttcagtccggggtccctgacaggttcagtggcagtggatcaggcacagattttacactgaaaatcagcagagtggaggctgaggatgttggggtttattactgcatgcaaggaacacactggcctcccacgttcggccaagggaccaaggtggaaatcaaaggtggcggtggctcgggcggtggtgggtcgggtggcggcggatctcaggtgcagctggtgcagtctggggctgaggtgaagaagcctgggtcctcggtgaaggtctcctgcaaggcttctggaggcaccttcagcagctatgctatcagctgggtgcgacaggcccctggacaagggcttgagtggatgggaggaatcacaccaatgtttggtacaacggactacgcacagaagttccagggcagagtcacgattaccgcggacgaatccacgagcacagcctacatggagctgagcagcctgagatctgaggacacggccgtgtattactgtgcgagagatgagcgggacggatacgccacagtggcttttgatatctggggccaagggacaatggtcaccgtctcttcaggtggaggcggttcaggcggaggtggctctggcggtggcggatcggatattgtgatgactcagtctccactctccctgcccgtcacccctggagagccggcctccatctcctgcaggtctagtcagagcctcctgcatagcaatggatacaactatttggattggtacctgcagaagccagggcagtctccacagctcctgatctatgatgcttctaatcttgagacaggggtccctgacaggttcagtggcagtggatcaggcacagattttacactgaaaatcagcagagtggaggctgaggatgttggggtttattactgcatgcaagggacgcattggcctcccacgttcggccaagggaccaaggtggaaatcaaaaccacgacgccagcgccgcggccaccaacaccggcgcccaccatcgcgtcgcagcccctgtccctgcgcccagaggcgtgccggccagcggcggggggcgcagtgcacacgagggggctggacttcgcctgtgatatctacatctgggcgcccttggccgggacttgtggggtccttctcctgtcactggttatcaccctttactgccggagggaccagaggctgccccccgatgcccacaagccccctgggggaggcagtttccggacccccatccaagaggagcaggccgacgcccactccaccctggccaagatcagagtgaagttcagcaggagcgcagacgcccccgcgtaccagcagggccagaaccagctctataacgagctcaatctaggacgaagagaggagtacgatgttttggacaagagacgtggccgggaccctgagatggggggaaagccgagaaggaagaaccctcaggaaggcctgtacaatgaactgcagaaagataagatggcggaggcctacagtgagattgggatgaaaggcgagcgccggaggggcaaggggcacgatggcctttaccagggtctcagtacagccaccaaggacacctacgacgcccttcacatgcaggccctgccccctcgcggctctggcgagggaaggggttccctgcttacttgcggcgacgtcgaagagaatcccggtccgatggccctcccagtaactgccctccttttgcccctcgcactccttcttcatgccgctcgccccaactgggtcaacgtgattagcgatttgaagaaaatcgaggaccttatacagtctatgcatattgacgctacactgtatactgagagtgatgtacacccgtcctgtaaggtaacggccatgaaatgctttcttctggagctccaggtcatcagcttggagtctggggacgcaagcatccacgatacggttgaaaacctcatcatccttgcgaacaactctctctcatctaatggaaacgttacagagagtgggtgtaaggagtgcgaagagttggaagaaaaaaacatcaaagaatttcttcaatccttcgttcacatagtgcaaatgttcattaacacgtccactaccacacccgccccgaggccacctacgccggcaccgactatcgccagtcaacccctctctctgcgccccgaggcttgccggcctgcggctggtggggcggtccacacccggggcctggattttgcgtgcgatatatacatctgggcacctcttgccggcacctgcggagtgctgcttctctcactcgttattacgctgtactgctaa

SEQ ID NO: 380 - DNA, 2964 bp, Artificial Sequence
  Synthetic
  misc_feature: NK77.82_64-68
atggccttaccagtgaccgccttgctcctgccgctggccttgctgctccacgccgccaggccggactacaaagacgatgacgataaaggcggtggtggctctggtggtggcggatcccaggtgcagctggtgcagtctggggctgaggtgaagaagcctgggtcctcggtgaaggtctcctgcaaggcttctggatacaccttcaccagctatggaatcagctgggtgcgacaggcccctggacaagggcttgagtggatgggaggtatcatccctatctttggtacaacgaactacgcacagaagttccagggcagagtcacgattaccgcggacgaatccacgagcacagcctacatggagctgagcagcctgagatctgaggacacggccgtgtattactgtgcgagagatcatagcggcgatgggtacttcgatctctggggccgtggcaccctggtcactgtctcctcaggtggaggcggttcaggcggaggtggctctggcggtggcggatcggatattgtgatgactcagtctccactctccctgcccgtcacccctggagagccggcctccatctcctgcaggtctagtcagagcctcctgcactccaacggatacaactatttggattggtacctgcagaagccagggcagtctccacagctcctgatctatgatgcctcttcacttcagtccggggtccctgacaggttcagtggcagtggatcaggcacagattttacactgaaaatcagcagagtggaggctgaggatgttggggtttattactgcatgcaaggaacacactggcctcccacgttcggccaagggaccaaggtggaaatcaaaggtggcggtggctcgggcggtggtgggtcgggtggcggcggatctcaggtgcagctggtgcagtctggggctgaggtgaagaagcctggggcctcagtgaaggtttcctgcaaggcatctggatacaccttcaccagctactatatgcactgggtgcgacaggcccctggacaagggcttgagtggatgggaataatcaaccctagtgacggaggaacaagctacgcagacaagttccagggcagagtcaccatgaccagggacacgtccacgagcacagtctacatggagctgagcagcctgagatctgaggacacggccgtgtattactgtgctagagcgcttgcccccctgggatggggtgacggcatggatgtctggggccaagggacaacagtcaccgtctcttcaggtggaggcggttcaggcggaggtggctctggcggtggcggatcggacatccagatgacccagtctccatcctccctgtctgcatctgtaggagacagagtcaccatcacttgccaggcgagtcaggacattagcaactatttaaattggtatcagcagaaaccagggaaagcccctaagctcctgatctacgatgcatccaatttggaaacaggggtcccatcaaggttcagtggaagtggatctgggacagattttactctcaccatcagcagcctgcagcctgaagatttcgcaacatattactgtcaacagtcatatgatggacctatcaccttcggccaagggacacgactggagattaaaaccacgacgccagcgccgcggccaccaacaccggcgcccaccatcgcgtcgcagcccctgtccctgcgcccagaggcgtgccggccagcggcggggggcgcagtgcacacgagggggctggacttcgcctgtgatatctacatctgggcgcccttggccgggacttgtggggtccttctcctgtcactggttatcaccctttactgccggagggaccagaggctgccccccgatgcccacaagccccctgggggaggcagtttccggacccccatccaagaggagcaggccgacgcccactccaccctggccaagatcagagtgaagttcagcaggagcgcagacgcccccgcgtaccagcagggccagaaccagctctataacgagctcaatctaggacgaagagaggagtacgatgttttggacaagagacgtggccgggaccctgagatggggggaaagccgagaaggaagaaccctcaggaaggcctgtacaatgaactgcagaaagataagatggcggaggcctacagtgagattgggatgaaaggcgagcgccggaggggcaaggggcacgatggcctttaccagggtctcagtacagccaccaaggacacctacgacgcccttcacatgcaggccctgccccctcgcggctctggcgagggaaggggttccctgcttacttgcggcgacgtcgaagagaatcccggtccgatggccctcccagtaactgccctccttttgcccctcgcactccttcttcatgccgctcgccccaactgggtcaacgtgattagcgatttgaagaaaatcgaggaccttatacagtctatgcatattgacgctacactgtatactgagagtgatgtacacccgtcctgtaaggtaacggccatgaaatgctttcttctggagctccaggtcatcagcttggagtctggggacgcaagcatccacgatacggttgaaaacctcatcatccttgcgaacaactctctctcatctaatggaaacgttacagagagtgggtgtaaggagtgcgaagagttggaagaaaaaaacatcaaagaatttcttcaatccttcgttcacatagtgcaaatgttcattaacacgtccactaccacacccgccccgaggccacctacgccggcaccgactatcgccagtcaacccctctctctgcgccccgaggcttgccggcctgcggctggtggggcggtccacacccggggcctggattttgcgtgcgatatatacatctgggcacctcttgccggcacctgcggagtgctgcttctctcactcgttattacgctgtactgctaa

SEQ ID NO: 381 - DNA, 2961 bp, Artificial Sequence
  Synthetic
  misc_feature: NK77.83_65-67
atggccttaccagtgaccgccttgctcctgccgctggccttgctgctccacgccgccaggccggactacaaagacgatgacgataaaggcggtggtggctctggtggtggcggatcccaggtgcagctggtgcagtctggggctgaggtgaagaagcctggggcctcagtgaaggtctcctgcaaggcttctggatacaccttcaccgagaatgagatgcactgggtgcgacaggcccctggacaagggcttgagtggatgggatggatcaacccgaacagtggtggcacaaactatgcacagaagtttcagggcagggtcaccatgaccagggacacgtccactagcacagtgtacatggagctgagctctctgagatctgaagacacggccgtgtattactgtgcggggagctggggtggttactactttgactactggggccaagggaccctggtcaccgtctcctcaggtggaggcggttcaggcggaggtggctctggcggtggcggatcggacatccagatgacccagtctccatcctccctgtctgcatctgtaggagacagagtcaccatcacttgccgggcaagtcagagcgttagcagatatttaaattggtatcagcagaaaccagggaaagcccctaagctcctgatctatgatgcatccaatttggaaaccggggtcccatcaaggttcagtggcagtggatctgggacagatttcactctcaccatcagcagtctgcaacctgaagattttgcaacttactactgtcaacaggccgacagtttccctgtgacttttggccaggggaccaagctggagatcaaaggtggcggtggctcgggcggtggtgggtcgggtggcggcggatctcaggtgcagctggtgcagtctggggctgaggtgaagaagcctgggtcctcggtgaaggtctcctgcaaggcttctggaggcaccttcagcagctatgctatcagctgggtgcgacaggcccctggacaagggcttgagtggatgggaggaatcacaccaatgtttggtacaacggactacgcacagaagttccagggcagagtcacgattaccgcggacgaatccacgagcacagcctacatggagctgagcagcctgagatctgaggacacggccgtgtattactgtgcgagagatgagcgggacggatacgccacagtggcttttgatatctggggccaagggacaatggtcaccgtctcttcaggtggaggcggttcaggcggaggtggctctggcggtggcggatcggatattgtgatgactcagtctccactctccctgcccgtcacccctggagagccggcctccatctcctgcaggtctagtcagagcctcctgcatagcaatggatacaactatttggattggtacctgcagaagccagggcagtctccacagctcctgatctatgatgcttctaatcttgagacaggggtccctgacaggttcagtggcagtggatcaggcacagattttacactgaaaatcagcagagtggaggctgaggatgttggggtttattactgcatgcaagggacgcattggcctcccacgttcggccaagggaccaaggtggaaatcaaaaccacgacgccagcgccgcggccaccaacaccggcgcccaccatcgcgtcgcagcccctgtccctgcgcccagaggcgtgccggccagcggcggggggcgcagtgcacacgagggggctggacttcgcctgtgatatctacatctgggcgcccttggccgggacttgtggggtccttctcctgtcactggttatcaccctttactgccggagggaccagaggctgccccccgatgcccacaagccccctgggggaggcagtttccggacccccatccaagaggagcaggccgacgcccactccaccctggccaagatcagagtgaagttcagcaggagcgcagacgcccccgcgtaccagcagggccagaaccagctctataacgagctcaatctaggacgaagagaggagtacgatgttttggacaagagacgtggccgggaccctgagatggggggaaagccgagaaggaagaaccctcaggaaggcctgtacaatgaactgcagaaagataagatggcggaggcctacagtgagattgggatgaaaggcgagcgccggaggggcaaggggcacgatggcctttaccagggtctcagtacagccaccaaggacacctacgacgcccttcacatgcaggccctgccccctcgcggctctggcgagggaaggggttccctgcttacttgcggcgacgtcgaagagaatcccggtccgatggccctcccagtaactgccctccttttgcccctcgcactccttcttcatgccgctcgccccaactgggtcaacgtgattagcgatttgaagaaaatcgaggaccttatacagtctatgcatattgacgctacactgtatactgagagtgatgtacacccgtcctgtaaggtaacggccatgaaatgctttcttctggagctccaggtcatcagcttggagtctggggacgcaagcatccacgatacggttgaaaacctcatcatccttgcgaacaactctctctcatctaatggaaacgttacagagagtgggtgtaaggagtgcgaagagttggaagaaaaaaacatcaaagaatttcttcaatccttcgttcacatagtgcaaatgttcattaacacgtccactaccacacccgccccgaggccacctacgccggcaccgactatcgccagtcaacccctctctctgcgccccgaggcttgccggcctgcggctggtggggcggtccacacccggggcctggattttgcgtgcgatatatacatctgggcacctcttgccggcacctgcggagtgctgcttctctcactcgttattacgctgtactgctaa

SEQ ID NO: 382 - DNA, 2946 bp, Artificial Sequence
  Synthetic
  misc_feature: NK77.84_65-68
atggccttaccagtgaccgccttgctcctgccgctggccttgctgctccacgccgccaggccggactacaaagacgatgacgataaaggcggtggtggctctggtggtggcggatcccaggtgcagctggtgcagtctggggctgaggtgaagaagcctggggcctcagtgaaggtctcctgcaaggcttctggatacaccttcaccgagaatgagatgcactgggtgcgacaggcccctggacaagggcttgagtggatgggatggatcaacccgaacagtggtggcacaaactatgcacagaagtttcagggcagggtcaccatgaccagggacacgtccactagcacagtgtacatggagctgagctctctgagatctgaagacacggccgtgtattactgtgcggggagctggggtggttactactttgactactggggccaagggaccctggtcaccgtctcctcaggtggaggcggttcaggcggaggtggctctggcggtggcggatcggacatccagatgacccagtctccatcctccctgtctgcatctgtaggagacagagtcaccatcacttgccgggcaagtcagagcgttagcagatatttaaattggtatcagcagaaaccagggaaagcccctaagctcctgatctatgatgcatccaatttggaaaccggggtcccatcaaggttcagtggcagtggatctgggacagatttcactctcaccatcagcagtctgcaacctgaagattttgcaacttactactgtcaacaggccgacagtttccctgtgacttttggccaggggaccaagctggagatcaaaggtggcggtggctcgggcggtggtgggtcgggtggcggcggatctcaggtgcagctggtgcagtctggggctgaggtgaagaagcctggggcctcagtgaaggtttcctgcaaggcatctggatacaccttcaccagctactatatgcactgggtgcgacaggcccctggacaagggcttgagtggatgggaataatcaaccctagtgacggaggaacaagctacgcagacaagttccagggcagagtcaccatgaccagggacacgtccacgagcacagtctacatggagctgagcagcctgagatctgaggacacggccgtgtattactgtgctagagcgcttgcccccctgggatggggtgacggcatggatgtctggggccaagggacaacagtcaccgtctcttcaggtggaggcggttcaggcggaggtggctctggcggtggcggatcggacatccagatgacccagtctccatcctccctgtctgcatctgtaggagacagagtcaccatcacttgccaggcgagtcaggacattagcaactatttaaattggtatcagcagaaaccagggaaagcccctaagctcctgatctacgatgcatccaatttggaaacaggggtcccatcaaggttcagtggaagtggatctgggacagattttactctcaccatcagcagcctgcagcctgaagatttcgcaacatattactgtcaacagtcatatgatggacctatcaccttcggccaagggacacgactggagattaaaaccacgacgccagcgccgcggccaccaacaccggcgcccaccatcgcgtcgcagcccctgtccctgcgcccagaggcgtgccggccagcggcggggggcgcagtgcacacgagggggctggacttcgcctgtgatatctacatctgggcgcccttggccgggacttgtggggtccttctcctgtcactggttatcaccctttactgccggagggaccagaggctgccccccgatgcccacaagccccctgggggaggcagtttccggacccccatccaagaggagcaggccgacgcccactccaccctggccaagatcagagtgaagttcagcaggagcgcagacgcccccgcgtaccagcagggccagaaccagctctataacgagctcaatctaggacgaagagaggagtacgatgttttggacaagagacgtggccgggaccctgagatggggggaaagccgagaaggaagaaccctcaggaaggcctgtacaatgaactgcagaaagataagatggcggaggcctacagtgagattgggatgaaaggcgagcgccggaggggcaaggggcacgatggcctttaccagggtctcagtacagccaccaaggacacctacgacgcccttcacatgcaggccctgccccctcgcggctctggcgagggaaggggttccctgcttacttgcggcgacgtcgaagagaatcccggtccgatggccctcccagtaactgccctccttttgcccctcgcactccttcttcatgccgctcgccccaactgggtcaacgtgattagcgatttgaagaaaatcgaggaccttatacagtctatgcatattgacgctacactgtatactgagagtgatgtacacccgtcctgtaaggtaacggccatgaaatgctttcttctggagctccaggtcatcagcttggagtctggggacgcaagcatccacgatacggttgaaaacctcatcatccttgcgaacaactctctctcatctaatggaaacgttacagagagtgggtgtaaggagtgcgaagagttggaagaaaaaaacatcaaagaatttcttcaatccttcgttcacatagtgcaaatgttcattaacacgtccactaccacacccgccccgaggccacctacgccggcaccgactatcgccagtcaacccctctctctgcgccccgaggcttgccggcctgcggctggtggggcggtccacacccggggcctggattttgcgtgcgatatatacatctgggcacctcttgccggcacctgcggagtgctgcttctctcactcgttattacgctgtactgctaa

SEQ ID NO: 383 - protein, 722 aa, Artificial Sequence
  Synthetic
  MISC_FEATURE: NK77.1_CD70_DB01_C03
MALPVTALLLPLALLLHAARPDYKDDDDKGGGGSGGGGSQVQLVQSGAEVKKPGASVKVSCKASGYTFTGHYLHWVRQAPGQGLEWMGWINPNSGGTNYAQKFQGRVTMTRDTSTSTVYMELSSLRSEDTAVYYCVRGSGWYDLDYWGQGTLVTVSSGGGGSGGGGSGGGGSDIQMTQSPSSLSASVGDRVTITCRASQNIGTYLAWYQQKPGKAPKLLIYDASNLETGVPSRFSGSGSGTDFTLTISSLQPEDFATYYCQQSYRIPLTFGQGTRLEIKTTTPAPRPPTPAPTIASQPLSLRPEACRPAAGGAVHTRGLDFACDIYIWAPLAGTCGVLLLSLVITLYCRRDQRLPPDAHKPPGGGSFRTPIQEEQADAHSTLAKIRVKFSRSADAPAYQQGQNQLYNELNLGRREEYDVLDKRRGRDPEMGGKPRRKNPQEGLYNELQKDKMAEAYSEIGMKGERRRGKGHDGLYQGLSTATKDTYDALHMQALPPRGSGEGRGSLLTCGDVEENPGPMALPVTALLLPLALLLHAARPNWVNVISDLKKIEDLIQSMHIDATLYTESDVHPSCKVTAMKCFLLELQVISLESGDASIHDTVENLIILANNSLSSNGNVTESGCKECEELEEKNIKEFLQSFVHIVQMFINTSTTTPAPRPPTPAPTIASQPLSLRPEACRPAAGGAVHTRGLDFACDIYIWAPLAGTCGVLLLSLVITLYC

SEQ ID NO: 384 - protein, 723 aa, Artificial Sequence
  Synthetic
  MISC_FEATURE: NK77.2_CD70_DB01_D02
MALPVTALLLPLALLLHAARPDYKDDDDKGGGGSGGGGSQVQLVQSGAEVKKPGASVKVSCKASGYTFTNYYMHWVRQAPGQGLEWMGIINPSGGSTSYAQKFQGRVTMTRDTSTSTVYMELSSLRSEDTAVYYCARELGVAGYFDLWGRGTLVTVSSGGGGSGGGGSGGGGSDIQMTQSPSSLSASVGDRVTITCRASQRISNWLAWYQQKPGKAPKLLIYDASNLETGVPSRFSGSGSGTDFTLTISSLQPEDFATYYCQQTYSPPPTFGQGTKLEIKTTTPAPRPPTPAPTIASQPLSLRPEACRPAAGGAVHTRGLDFACDIYIWAPLAGTCGVLLLSLVITLYCRRDQRLPPDAHKPPGGGSFRTPIQEEQADAHSTLAKIRVKFSRSADAPAYQQGQNQLYNELNLGRREEYDVLDKRRGRDPEMGGKPRRKNPQEGLYNELQKDKMAEAYSEIGMKGERRRGKGHDGLYQGLSTATKDTYDALHMQALPPRGSGEGRGSLLTCGDVEENPGPMALPVTALLLPLALLLHAARPNWVNVISDLKKIEDLIQSMHIDATLYTESDVHPSCKVTAMKCFLLELQVISLESGDASIHDTVENLIILANNSLSSNGNVTESGCKECEELEEKNIKEFLQSFVHIVQMFINTSTTTPAPRPPTPAPTIASQPLSLRPEACRPAAGGAVHTRGLDFACDIYIWAPLAGTCGVLLLSLVITLYC

SEQ ID NO: 385 - protein, 732 aa, Artificial Sequence
  Synthetic
  MISC_FEATURE: NK77.3_CD70_DB01_E06
MALPVTALLLPLALLLHAARPDYKDDDDKGGGGSGGGGSQVQLVQSGAEVKKPGASVKVSCKASGYTFTGYYIHWVRQAPGQGLEWMGIINPSGGSTSYAQKFQGRVTMTRDTSTSTVYMELSSLRSEDTAVYYCARDLSGIDGYIGFFDYWGQGTLVTVSSGGGGSGGGGSGGGGSDIVMTQSPLSLPVTPGEPASISCRSSQSLLHSNGYNYLDWYLQKPGQSPQLLIYAASSLQSGVPDRFSGSGSGTDFTLKISRVEAEDVGVYYCMQALQTPITFGQGTRLEIKTTTPAPRPPTPAPTIASQPLSLRPEACRPAAGGAVHTRGLDFACDIYIWAPLAGTCGVLLLSLVITLYCRRDQRLPPDAHKPPGGGSFRTPIQEEQADAHSTLAKIRVKFSRSADAPAYQQGQNQLYNELNLGRREEYDVLDKRRGRDPEMGGKPRRKNPQEGLYNELQKDKMAEAYSEIGMKGERRRGKGHDGLYQGLSTATKDTYDALHMQALPPRGSGEGRGSLLTCGDVEENPGPMALPVTALLLPLALLLHAARPNWVNVISDLKKIEDLIQSMHIDATLYTESDVHPSCKVTAMKCFLLELQVISLESGDASIHDTVENLIILANNSLSSNGNVTESGCKECEELEEKNIKEFLQSFVHIVQMFINTSTTTPAPRPPTPAPTIASQPLSLRPEACRPAAGGAVHTRGLDFACDIYIWAPLAGTCGVLLLSLVITLYC

SEQ ID NO: 386 - protein, 723 aa, Artificial Sequence
  Synthetic
  MISC_FEATURE: NK77.4_CD70_DB01_G04
MALPVTALLLPLALLLHAARPDYKDDDDKGGGGSGGGGSQVQLVQSGAEVKKPGASVKVSCKASGGTFRSHVISWVRQAPGQGLEWMGIIDPSGGSTSYAQRFQGRVTMTRDTSTSTVYMELSSLRSEDTAVYYCAKDYTGLLGMDVWGQGTTVTVSSGGGGSGGGGSGGGGSDIQMTQSPSSLSASVGDRVTITCRASQDIDTYLAWYQQKPGKAPKLLIYAASSLQSGVPSRFSGSGSGTDFTLTISSLQPEDFATYYCQQSYTTPFTFGQGTKVEIKTTTPAPRPPTPAPTIASQPLSLRPEACRPAAGGAVHTRGLDFACDIYIWAPLAGTCGVLLLSLVITLYCRRDQRLPPDAHKPPGGGSFRTPIQEEQADAHSTLAKIRVKFSRSADAPAYQQGQNQLYNELNLGRREEYDVLDKRRGRDPEMGGKPRRKNPQEGLYNELQKDKMAEAYSEIGMKGERRRGKGHDGLYQGLSTATKDTYDALHMQALPPRGSGEGRGSLLTCGDVEENPGPMALPVTALLLPLALLLHAARPNWVNVISDLKKIEDLIQSMHIDATLYTESDVHPSCKVTAMKCFLLELQVISLESGDASIHDTVENLIILANNSLSSNGNVTESGCKECEELEEKNIKEFLQSFVHIVQMFINTSTTTPAPRPPTPAPTIASQPLSLRPEACRPAAGGAVHTRGLDFACDIYIWAPLAGTCGVLLLSLVITLYC

SEQ ID NO: 387 - protein, 723 aa, Artificial Sequence
  Synthetic
  MISC_FEATURE: NK77.5_CD70_DB01_G05
MALPVTALLLPLALLLHAARPDYKDDDDKGGGGSGGGGSQVQLVQSGAEVKKPGASVKVSCKASGYTFIDYYIHWVRQAPGQGLEWMGWMNPNSGNTGYAQKFQGRVTMTRDTSTSTVYMELSSLRSEDTAVYYCARGLSGYDLDDYWGQGTLVTVSSGGGGSGGGGSGGGGSDIQMTQSPSSLSASVGDRVTITCQASQDISNYLNWYQQKPGKAPKLLIYDASSLESGVPSRFSGSGSGTDFTLTISSLQPEDFATYYCQQSYRSPLTFGGGTKVEIKTTTPAPRPPTPAPTIASQPLSLRPEACRPAAGGAVHTRGLDFACDIYIWAPLAGTCGVLLLSLVITLYCRRDQRLPPDAHKPPGGGSFRTPIQEEQADAHSTLAKIRVKFSRSADAPAYQQGQNQLYNELNLGRREEYDVLDKRRGRDPEMGGKPRRKNPQEGLYNELQKDKMAEAYSEIGMKGERRRGKGHDGLYQGLSTATKDTYDALHMQALPPRGSGEGRGSLLTCGDVEENPGPMALPVTALLLPLALLLHAARPNWVNVISDLKKIEDLIQSMHIDATLYTESDVHPSCKVTAMKCFLLELQVISLESGDASIHDTVENLIILANNSLSSNGNVTESGCKECEELEEKNIKEFLQSFVHIVQMFINTSTTTPAPRPPTPAPTIASQPLSLRPEACRPAAGGAVHTRGLDFACDIYIWAPLAGTCGVLLLSLVITLYC

SEQ ID NO: 388 - protein, 722 aa, Artificial Sequence
  Synthetic
  MISC_FEATURE: NK77.6_CD70_DB01_G07
MALPVTALLLPLALLLHAARPDYKDDDDKGGGGSGGGGSQVQLVQSGAEVKKPGASVKVSCKASGYTFTSYYMHWVRQAPGQGLEWMGWINPNSGGTKYAHKFQGRVTMTRDTSTSTVYMELSSLRSEDTAVYYCARGLSGYDFDYWGQGTTVTVSSGGGGSGGGGSGGGGSDIQMTQSPSSLSASVGDRVTITCQASQDISNYLNWYQQKPGKAPKLLIYDASNLETGVPSRFSGSGSGTDFTLTISSLQPEDFATYYCQQAYRWPITFGQGTRLEIKTTTPAPRPPTPAPTIASQPLSLRPEACRPAAGGAVHTRGLDFACDIYIWAPLAGTCGVLLLSLVITLYCRRDQRLPPDAHKPPGGGSFRTPIQEEQADAHSTLAKIRVKFSRSADAPAYQQGQNQLYNELNLGRREEYDVLDKRRGRDPEMGGKPRRKNPQEGLYNELQKDKMAEAYSEIGMKGERRRGKGHDGLYQGLSTATKDTYDALHMQALPPRGSGEGRGSLLTCGDVEENPGPMALPVTALLLPLALLLHAARPNWVNVISDLKKIEDLIQSMHIDATLYTESDVHPSCKVTAMKCFLLELQVISLESGDASIHDTVENLIILANNSLSSNGNVTESGCKECEELEEKNIKEFLQSFVHIVQMFINTSTTTPAPRPPTPAPTIASQPLSLRPEACRPAAGGAVHTRGLDFACDIYIWAPLAGTCGVLLLSLVITLYC

SEQ ID NO: 389 - protein, 723 aa, Artificial Sequence
  Synthetic
  MISC_FEATURE: NK77.7_CD70_DB01_G11
MALPVTALLLPLALLLHAARPDYKDDDDKGGGGSGGGGSQVQLVQSGAEVKKPGASVKVSCKASGYTFTGYYMHWVRQAPGQGLEWMGWMNPNSGNTGYAQKFQGRVTMTRDTSTSTVYMELSSLRSEDTAVYYCARGTDVYGDFDYWGQGTLVTVSSGGGGSGGGGSGGGGSDIQMTQSPSSLSASVGDRVTITCRASQSISSYLNWYQQKPGKAPKLLIYDASYLETGVPSRFSGSGSGTDFTLTISSLQPEDFATYYCQQSYTIPPTFGQGTKVEIKTTTPAPRPPTPAPTIASQPLSLRPEACRPAAGGAVHTRGLDFACDIYIWAPLAGTCGVLLLSLVITLYCRRDQRLPPDAHKPPGGGSFRTPIQEEQADAHSTLAKIRVKFSRSADAPAYQQGQNQLYNELNLGRREEYDVLDKRRGRDPEMGGKPRRKNPQEGLYNELQKDKMAEAYSEIGMKGERRRGKGHDGLYQGLSTATKDTYDALHMQALPPRGSGEGRGSLLTCGDVEENPGPMALPVTALLLPLALLLHAARPNWVNVISDLKKIEDLIQSMHIDATLYTESDVHPSCKVTAMKCFLLELQVISLESGDASIHDTVENLIILANNSLSSNGNVTESGCKECEELEEKNIKEFLQSFVHIVQMFINTSTTTPAPRPPTPAPTIASQPLSLRPEACRPAAGGAVHTRGLDFACDIYIWAPLAGTCGVLLLSLVITLYC

SEQ ID NO: 390 - protein, 730 aa, Artificial Sequence
  Synthetic
  MISC_FEATURE: NK77.9_CD70_DB02_A03
MALPVTALLLPLALLLHAARPDYKDDDDKGGGGSGGGGSQVQLVQSGAEVKKPGSSVKVSCKASGYTFTENEMHWVRQAPGQGLEWMGGIIPIFGTANYAQKFQGRVTITADESTSTAYMELSSLRSEDTAVYYCAREGGTAMATGYYYYGMDVWGQGTTVTVSSGGGGSGGGGSGGGGSDIQMTQSPSSLSASVGDRVTITCQASQDISNYLNWYQQKPGKAPKLLIYDASNLETGVPSRFSGSGSGTDFTLTISSLQPEDFATYYCQQSYSTPLTFGQGTKVEIKTTTPAPRPPTPAPTIASQPLSLRPEACRPAAGGAVHTRGLDFACDIYIWAPLAGTCGVLLLSLVITLYCRRDQRLPPDAHKPPGGGSFRTPIQEEQADAHSTLAKIRVKFSRSADAPAYQQGQNQLYNELNLGRREEYDVLDKRRGRDPEMGGKPRRKNPQEGLYNELQKDKMAEAYSEIGMKGERRRGKGHDGLYQGLSTATKDTYDALHMQALPPRGSGEGRGSLLTCGDVEENPGPMALPVTALLLPLALLLHAARPNWVNVISDLKKIEDLIQSMHIDATLYTESDVHPSCKVTAMKCFLLELQVISLESGDASIHDTVENLIILANNSLSSNGNVTESGCKECEELEEKNIKEFLQSFVHIVQMFINTSTTTPAPRPPTPAPTIASQPLSLRPEACRPAAGGAVHTRGLDFACDIYIWAPLAGTCGVLLLSLVITLYC

SEQ ID NO: 391 - protein, 728 aa, Artificial Sequence
  Synthetic
  MISC_FEATURE: NK77.10_CD70_DB02_A04
MALPVTALLLPLALLLHAARPDYKDDDDKGGGGSGGGGSQVQLVQSGAEVKKPGASVKVSCKASGYTFTENEMHWVRQAPGQGLEWMGWINSNGGYTGYALKFQGRVTMTRDTSTSTVYMELSSLRSEDTAVYYCARASNYGGHFDYWGQGTLVTVSSGGGGSGGGGSGGGGSDIVMTQSPLSLPVTPGEPASISCRSSQSLLHSNGYNYLDWYLQKPGQSPQLLIYQASSLESGVPDRFSGSGSGTDFTLKISRVEAEDVGVYYCMQGTHWPPTFGGGTKVEIKTTTPAPRPPTPAPTIASQPLSLRPEACRPAAGGAVHTRGLDFACDIYIWAPLAGTCGVLLLSLVITLYCRRDQRLPPDAHKPPGGGSFRTPIQEEQADAHSTLAKIRVKFSRSADAPAYQQGQNQLYNELNLGRREEYDVLDKRRGRDPEMGGKPRRKNPQEGLYNELQKDKMAEAYSEIGMKGERRRGKGHDGLYQGLSTATKDTYDALHMQALPPRGSGEGRGSLLTCGDVEENPGPMALPVTALLLPLALLLHAARPNWVNVISDLKKIEDLIQSMHIDATLYTESDVHPSCKVTAMKCFLLELQVISLESGDASIHDTVENLIILANNSLSSNGNVTESGCKECEELEEKNIKEFLQSFVHIVQMFINTSTTTPAPRPPTPAPTIASQPLSLRPEACRPAAGGAVHTRGLDFACDIYIWAPLAGTCGVLLLSLVITLYC

SEQ ID NO: 392 - protein, 723 aa, Artificial Sequence
  Synthetic
  MISC_FEATURE: NK77.11_CD70_DB02_A05
MALPVTALLLPLALLLHAARPDYKDDDDKGGGGSGGGGSQVQLVQSGAEVKKPGASVKVSCKASGYTFTSYYMHWVRQAPGQGLEWMGIINPSGGSTIYAQKFQGRVTMTRDTSTSTVYMELSSLRSEDTAVYYCAKDMGAWAAGFDYWGQGTLVTVSSGGGGSGGGGSGGGGSDIQMTQSPSSLSASVGDRVTITCQASQDISNYLNWYQQKPGKAPKLLIYATSTLANGVPSRFSGSGSGTDFTLTISSLQPEDFATYYCQQSYSTLTFGQGTRLEIKTTTPAPRPPTPAPTIASQPLSLRPEACRPAAGGAVHTRGLDFACDIYIWAPLAGTCGVLLLSLVITLYCRRDQRLPPDAHKPPGGGSFRTPIQEEQADAHSTLAKIRVKFSRSADAPAYQQGQNQLYNELNLGRREEYDVLDKRRGRDPEMGGKPRRKNPQEGLYNELQKDKMAEAYSEIGMKGERRRGKGHDGLYQGLSTATKDTYDALHMQALPPRGSGEGRGSLLTCGDVEENPGPMALPVTALLLPLALLLHAARPNWVNVISDLKKIEDLIQSMHIDATLYTESDVHPSCKVTAMKCFLLELQVISLESGDASIHDTVENLIILANNSLSSNGNVTESGCKECEELEEKNIKEFLQSFVHIVQMFINTSTTTPAPRPPTPAPTIASQPLSLRPEACRPAAGGAVHTRGLDFACDIYIWAPLAGTCGVLLLSLVITLYC

SEQ ID NO: 393 - protein, 724 aa, Artificial Sequence
  Synthetic
  MISC_FEATURE: NK77.12_CD70_DB02_A06
MALPVTALLLPLALLLHAARPDYKDDDDKGGGGSGGGGSQVQLVQSGAEVKKPGASVKVSCKASGYTFTGYYMHWVRQAPGQGLEWMGWINPNSGDTGYAQKFQGRVTMTRDTSTSTVYMELSSLRSEDTAVYYCARSVNDYGDYDGYWGQGTLVTVSSGGGGSGGGGSGGGGSDIQMTQSPSSLSASVGDRVTITCQASQDISNYLNWYQQKPGKAPKLLIYDASNLETGVPSRFSGSGSGTDFTLTISSLQPEDFATYYCQQSYSTPPTFGQGTKVEIKTTTPAPRPPTPAPTIASQPLSLRPEACRPAAGGAVHTRGLDFACDIYIWAPLAGTCGVLLLSLVITLYCRRDQRLPPDAHKPPGGGSFRTPIQEEQADAHSTLAKIRVKFSRSADAPAYQQGQNQLYNELNLGRREEYDVLDKRRGRDPEMGGKPRRKNPQEGLYNELQKDKMAEAYSEIGMKGERRRGKGHDGLYQGLSTATKDTYDALHMQALPPRGSGEGRGSLLTCGDVEENPGPMALPVTALLLPLALLLHAARPNWVNVISDLKKIEDLIQSMHIDATLYTESDVHPSCKVTAMKCFLLELQVISLESGDASIHDTVENLIILANNSLSSNGNVTESGCKECEELEEKNIKEFLQSFVHIVQMFINTSTTTPAPRPPTPAPTIASQPLSLRPEACRPAAGGAVHTRGLDFACDIYIWAPLAGTCGVLLLSLVITLYC

SEQ ID NO: 394 - protein, 724 aa, Artificial Sequence
  Synthetic
  MISC_FEATURE: NK77.13_CD70_DB02_A07
MALPVTALLLPLALLLHAARPDYKDDDDKGGGGSGGGGSQVQLVQSGAEVKKPGASVKVSCKASGYTFTGYYMHWVRQAPGQGLEWMGIINPSGGSTSYAQKFQGRVTMTRDTSTSTVYMELSSLRSEDTAVYYCARDYGDYDASFDYWGQGTLVTVSSGGGGSGGGGSGGGGSDIQMTQSPSSLSASVGDRVTITCRASQSIDNWLAWYQQKPGKAPKLLIYAASTLQSGVPSRFSGSGSGTDFTLTISSLQPEDFATYYCQQSYDSPPTFGQGTKLEIKTTTPAPRPPTPAPTIASQPLSLRPEACRPAAGGAVHTRGLDFACDIYIWAPLAGTCGVLLLSLVITLYCRRDQRLPPDAHKPPGGGSFRTPIQEEQADAHSTLAKIRVKFSRSADAPAYQQGQNQLYNELNLGRREEYDVLDKRRGRDPEMGGKPRRKNPQEGLYNELQKDKMAEAYSEIGMKGERRRGKGHDGLYQGLSTATKDTYDALHMQALPPRGSGEGRGSLLTCGDVEENPGPMALPVTALLLPLALLLHAARPNWVNVISDLKKIEDLIQSMHIDATLYTESDVHPSCKVTAMKCFLLELQVISLESGDASIHDTVENLIILANNSLSSNGNVTESGCKECEELEEKNIKEFLQSFVHIVQMFINTSTTTPAPRPPTPAPTIASQPLSLRPEACRPAAGGAVHTRGLDFACDIYIWAPLAGTCGVLLLSLVITLYC

SEQ ID NO: 395 - protein, 721 aa, Artificial Sequence
  Synthetic
  MISC_FEATURE: NK77.14_CD70_DB02_A08
MALPVTALLLPLALLLHAARPDYKDDDDKGGGGSGGGGSQVQLVQSGAEVKKPGASVKVSCKASGYTFTSYDINWVRQAPGQGLEWMGIINPSDGSTIYAQNFQGRVTMTRDTSTSTVYMELSSLRSEDTAVYYCVKEEAWYFDLWGRGTLVTVSSGGGGSGGGGSGGGGSDIQMTQSPSSLSASVGDRVTITCQASQDISNYLNWYQQKPGKAPKLLIYDASNLETGVPSRFSGSGSGTDFTLTISSLQPEDFATYYCQQSYSTPLTFGGGTKVEIKTTTPAPRPPTPAPTIASQPLSLRPEACRPAAGGAVHTRGLDFACDIYIWAPLAGTCGVLLLSLVITLYCRRDQRLPPDAHKPPGGGSFRTPIQEEQADAHSTLAKIRVKFSRSADAPAYQQGQNQLYNELNLGRREEYDVLDKRRGRDPEMGGKPRRKNPQEGLYNELQKDKMAEAYSEIGMKGERRRGKGHDGLYQGLSTATKDTYDALHMQALPPRGSGEGRGSLLTCGDVEENPGPMALPVTALLLPLALLLHAARPNWVNVISDLKKIEDLIQSMHIDATLYTESDVHPSCKVTAMKCFLLELQVISLESGDASIHDTVENLIILANNSLSSNGNVTESGCKECEELEEKNIKEFLQSFVHIVQMFINTSTTTPAPRPPTPAPTIASQPLSLRPEACRPAAGGAVHTRGLDFACDIYIWAPLAGTCGVLLLSLVITLYC

SEQ ID NO: 396 - protein, 721 aa, Artificial Sequence
  Synthetic
  MISC_FEATURE: NK77.15_CD70_DB02_A09
MALPVTALLLPLALLLHAARPDYKDDDDKGGGGSGGGGSQVQLVQSGAEVKKPGASVKVSCKASGYTFTSYYMHWVRQAPGQGLEWMGWMNPDNGDTGYAQMFQGRVTMTRDTSTSTVYMELSSLRSEDTAVYYCASGDYYDILYWGQGTLVTVSSGGGGSGGGGSGGGGSDIQMTQSPSSLSASVGDRVTITCQASQDISNYLNWYQQKPGKAPKLLIYDVSNLETGVPSRFSGSGSGTDFTLTISSLQPEDFATYYCQQANSFPLTFGGGTKVEIKTTTPAPRPPTPAPTIASQPLSLRPEACRPAAGGAVHTRGLDFACDIYIWAPLAGTCGVLLLSLVITLYCRRDQRLPPDAHKPPGGGSFRTPIQEEQADAHSTLAKIRVKFSRSADAPAYQQGQNQLYNELNLGRREEYDVLDKRRGRDPEMGGKPRRKNPQEGLYNELQKDKMAEAYSEIGMKGERRRGKGHDGLYQGLSTATKDTYDALHMQALPPRGSGEGRGSLLTCGDVEENPGPMALPVTALLLPLALLLHAARPNWVNVISDLKKIEDLIQSMHIDATLYTESDVHPSCKVTAMKCFLLELQVISLESGDASIHDTVENLIILANNSLSSNGNVTESGCKECEELEEKNIKEFLQSFVHIVQMFINTSTTTPAPRPPTPAPTIASQPLSLRPEACRPAAGGAVHTRGLDFACDIYIWAPLAGTCGVLLLSLVITLYC

SEQ ID NO: 397 - protein, 722 aa, Artificial Sequence
  Synthetic
  MISC_FEATURE: NK77.16_CD70_DB02_A11
MALPVTALLLPLALLLHAARPDYKDDDDKGGGGSGGGGSQVQLVQSGAEVKKPGASVKVSCKASGYTFTSYYMHWVRQAPGQGLEWMGWMNPNSGDTGYAQKFQGRVTMTRDTSTSTVYMELSSLRSEDTAVYYCARGPSGYEFDYWGQGTLVTVSSGGGGSGGGGSGGGGSDIQMTQSPSSLSASVGDRVTITCRASQTISNYLNWYQQKPGKAPKLLIYDASSLESGVPSRFSGSGSGTDFTLTISSLQPEDFATYYCQQAISFPLTFGGGTKVEIKTTTPAPRPPTPAPTIASQPLSLRPEACRPAAGGAVHTRGLDFACDIYIWAPLAGTCGVLLLSLVITLYCRRDQRLPPDAHKPPGGGSFRTPIQEEQADAHSTLAKIRVKFSRSADAPAYQQGQNQLYNELNLGRREEYDVLDKRRGRDPEMGGKPRRKNPQEGLYNELQKDKMAEAYSEIGMKGERRRGKGHDGLYQGLSTATKDTYDALHMQALPPRGSGEGRGSLLTCGDVEENPGPMALPVTALLLPLALLLHAARPNWVNVISDLKKIEDLIQSMHIDATLYTESDVHPSCKVTAMKCFLLELQVISLESGDASIHDTVENLIILANNSLSSNGNVTESGCKECEELEEKNIKEFLQSFVHIVQMFINTSTTTPAPRPPTPAPTIASQPLSLRPEACRPAAGGAVHTRGLDFACDIYIWAPLAGTCGVLLLSLVITLYC

SEQ ID NO: 398 - protein, 726 aa, Artificial Sequence
  Synthetic
  MISC_FEATURE: NK77.17_CD70_DB02_B06
MALPVTALLLPLALLLHAARPDYKDDDDKGGGGSGGGGSQVQLVQSGAEVKKPGASVKVSCKASGYTFTDYYMHWVRQAPGQGLEWMGIINPNSGGTNYAQKFQGRVTMTRDTSTSTVYMELSSLRSEDTAVYYCARDFSVYAAADGMDVWGQGTLVTVSSGGGGSGGGGSGGGGSDIQMTQSPSSLSASVGDRVTITCRASQSISSYLNWYQQKPGKAPKLLIYDASNLATGVPSRFSGSGSGTDFTLTISSLQPEDFATYYCQQSDSSPLTFGQGTKVEIKTTTPAPRPPTPAPTIASQPLSLRPEACRPAAGGAVHTRGLDFACDIYIWAPLAGTCGVLLLSLVITLYCRRDQRLPPDAHKPPGGGSFRTPIQEEQADAHSTLAKIRVKFSRSADAPAYQQGQNQLYNELNLGRREEYDVLDKRRGRDPEMGGKPRRKNPQEGLYNELQKDKMAEAYSEIGMKGERRRGKGHDGLYQGLSTATKDTYDALHMQALPPRGSGEGRGSLLTCGDVEENPGPMALPVTALLLPLALLLHAARPNWVNVISDLKKIEDLIQSMHIDATLYTESDVHPSCKVTAMKCFLLELQVISLESGDASIHDTVENLIILANNSLSSNGNVTESGCKECEELEEKNIKEFLQSFVHIVQMFINTSTTTPAPRPPTPAPTIASQPLSLRPEACRPAAGGAVHTRGLDFACDIYIWAPLAGTCGVLLLSLVITLYC

SEQ ID NO: 399 - protein, 725 aa, Artificial Sequence
  Synthetic
  MISC_FEATURE: NK77.18_CD70_DB02_B09
MALPVTALLLPLALLLHAARPDYKDDDDKGGGGSGGGGSQVQLVQSGAEVKKPGASVKVSCKASGYTFTGYYMHWVRQAPGQGLEWMGIINPGDGGTIYAQNFQGRVTMTRDTSTSTVYMELSSLRSEDTAVYYCARGFGESAPDAFDIWGQGTMVTVSSGGGGSGGGGSGGGGSDIQMTQSPSSLSASVGDRVTITCQASQDISNYLNWYQQKPGKAPKLLIYGATTLQSGVPSRFSGSGSGTDFTLTISSLQPEDFATYYCQQADSFPYTFGQGTKLEIKTTTPAPRPPTPAPTIASQPLSLRPEACRPAAGGAVHTRGLDFACDIYIWAPLAGTCGVLLLSLVITLYCRRDQRLPPDAHKPPGGGSFRTPIQEEQADAHSTLAKIRVKFSRSADAPAYQQGQNQLYNELNLGRREEYDVLDKRRGRDPEMGGKPRRKNPQEGLYNELQKDKMAEAYSEIGMKGERRRGKGHDGLYQGLSTATKDTYDALHMQALPPRGSGEGRGSLLTCGDVEENPGPMALPVTALLLPLALLLHAARPNWVNVISDLKKIEDLIQSMHIDATLYTESDVHPSCKVTAMKCFLLELQVISLESGDASIHDTVENLIILANNSLSSNGNVTESGCKECEELEEKNIKEFLQSFVHIVQMFINTSTTTPAPRPPTPAPTIASQPLSLRPEACRPAAGGAVHTRGLDFACDIYIWAPLAGTCGVLLLSLVITLYC

SEQ ID NO: 400 - protein, 722 aa, Artificial Sequence
  Synthetic
  MISC_FEATURE: NK77.19_CD70_DB02_C03
MALPVTALLLPLALLLHAARPDYKDDDDKGGGGSGGGGSQVQLVQSGAEVKKPGASVKVSCKASGYTFTGYYMHWVRQAPGQGLEWMGIINPSGGSTSYAQKFQGRVTMTRDTSTSTVYMELSSLRSEDTAVYYCAAGTEIYYMDVWGKGTTVTVSSGGGGSGGGGSGGGGSDIQMTQSPSSLSASVGDRVTITCRASQTIDIYLNWYQQKPGKAPKLLIYDASNLETGVPSRFSGSGSGTDFTLTISSLQPEDFATYYCQQADSFPLTFGGGTKVEIKTTTPAPRPPTPAPTIASQPLSLRPEACRPAAGGAVHTRGLDFACDIYIWAPLAGTCGVLLLSLVITLYCRRDQRLPPDAHKPPGGGSFRTPIQEEQADAHSTLAKIRVKFSRSADAPAYQQGQNQLYNELNLGRREEYDVLDKRRGRDPEMGGKPRRKNPQEGLYNELQKDKMAEAYSEIGMKGERRRGKGHDGLYQGLSTATKDTYDALHMQALPPRGSGEGRGSLLTCGDVEENPGPMALPVTALLLPLALLLHAARPNWVNVISDLKKIEDLIQSMHIDATLYTESDVHPSCKVTAMKCFLLELQVISLESGDASIHDTVENLIILANNSLSSNGNVTESGCKECEELEEKNIKEFLQSFVHIVQMFINTSTTTPAPRPPTPAPTIASQPLSLRPEACRPAAGGAVHTRGLDFACDIYIWAPLAGTCGVLLLSLVITLYC

SEQ ID NO: 401 - protein, 731 aa, Artificial Sequence
  Synthetic
  MISC_FEATURE: NK77.20_CD70_DB02_C04
MALPVTALLLPLALLLHAARPDYKDDDDKGGGGSGGGGSQVQLVQSGAEVKKPGASVKVSCKASGGTFSSYAISWVRQAPGQGLEWMGMINPSDGATTYAQKFQGRVTMTRDTSTSTVYMELSSLRSEDTAVYYCARERELLHFATNYYYYGMDVWGQGTTVTVSSGGGGSGGGGSGGGGSDIQMTQSPSSLSASVGDRVTITCRASQGISNNLNWYQQKPGKAPKLLIYAASSLHSGVPSRFSGSGSGTDFTLTISSLQPEDFATYYCQQADAFPLTFGGGTKVEIKTTTPAPRPPTPAPTIASQPLSLRPEACRPAAGGAVHTRGLDFACDIYIWAPLAGTCGVLLLSLVITLYCRRDQRLPPDAHKPPGGGSFRTPIQEEQADAHSTLAKIRVKFSRSADAPAYQQGQNQLYNELNLGRREEYDVLDKRRGRDPEMGGKPRRKNPQEGLYNELQKDKMAEAYSEIGMKGERRRGKGHDGLYQGLSTATKDTYDALHMQALPPRGSGEGRGSLLTCGDVEENPGPMALPVTALLLPLALLLHAARPNWVNVISDLKKIEDLIQSMHIDATLYTESDVHPSCKVTAMKCFLLELQVISLESGDASIHDTVENLIILANNSLSSNGNVTESGCKECEELEEKNIKEFLQSFVHIVQMFINTSTTTPAPRPPTPAPTIASQPLSLRPEACRPAAGGAVHTRGLDFACDIYIWAPLAGTCGVLLLSLVITLYC

SEQ ID NO: 402 - protein, 727 aa, Artificial Sequence
  Synthetic
  MISC_FEATURE: NK77.22_CD70_DB02_C07
MALPVTALLLPLALLLHAARPDYKDDDDKGGGGSGGGGSQVQLVQSGAEVKKPGASVKVSCKASGYTFTRNYMHWVRQAPGQGLEWMGWISPDNGVTNYAQNFQGRVTMTRDTSTSTVYMELSSLRSEDTAVYYCAKTQGSSSWYQWYFDLWGRGTLVTVSSGGGGSGGGGSGGGGSDIQMTQSPSSLSASVGDRVTITCRASQSIGTWLAWYQQKPGKAPKLLIYAASSLQSGVPSRFSGSGSGTDFTLTISSLQPEDFATYYCQQSYTTPITFGQGTKVEIKTTTPAPRPPTPAPTIASQPLSLRPEACRPAAGGAVHTRGLDFACDIYIWAPLAGTCGVLLLSLVITLYCRRDQRLPPDAHKPPGGGSFRTPIQEEQADAHSTLAKIRVKFSRSADAPAYQQGQNQLYNELNLGRREEYDVLDKRRGRDPEMGGKPRRKNPQEGLYNELQKDKMAEAYSEIGMKGERRRGKGHDGLYQGLSTATKDTYDALHMQALPPRGSGEGRGSLLTCGDVEENPGPMALPVTALLLPLALLLHAARPNWVNVISDLKKIEDLIQSMHIDATLYTESDVHPSCKVTAMKCFLLELQVISLESGDASIHDTVENLIILANNSLSSNGNVTESGCKECEELEEKNIKEFLQSFVHIVQMFINTSTTTPAPRPPTPAPTIASQPLSLRPEACRPAAGGAVHTRGLDFACDIYIWAPLAGTCGVLLLSLVITLYC

SEQ ID NO: 403 - protein, 723 aa, Artificial Sequence
  Synthetic
  MISC_FEATURE: NK77.24_CD70_DB02_D02
MALPVTALLLPLALLLHAARPDYKDDDDKGGGGSGGGGSQVQLVQSGAEVKKPGASVKVSCKASGYTFTSYYMHWVRQAPGQGLEWMGIIDPGSGDTSYAQKFQGRVTMTRDTSTSTVYMELSSLRSEDTAVYYCARGSNWYDYFDYWGQGTLVTVSSGGGGSGGGGSGGGGSEIVMTQSPATLSVSPGERATLSCRASQSVSSYLAWYQQKPGQAPRLLIYGASTRATGIPARFSGSGSGTEFTLTISSLQSEDFAVYYCQQYDSYPPTFGGGTKVEIKTTTPAPRPPTPAPTIASQPLSLRPEACRPAAGGAVHTRGLDFACDIYIWAPLAGTCGVLLLSLVITLYCRRDQRLPPDAHKPPGGGSFRTPIQEEQADAHSTLAKIRVKFSRSADAPAYQQGQNQLYNELNLGRREEYDVLDKRRGRDPEMGGKPRRKNPQEGLYNELQKDKMAEAYSEIGMKGERRRGKGHDGLYQGLSTATKDTYDALHMQALPPRGSGEGRGSLLTCGDVEENPGPMALPVTALLLPLALLLHAARPNWVNVISDLKKIEDLIQSMHIDATLYTESDVHPSCKVTAMKCFLLELQVISLESGDASIHDTVENLIILANNSLSSNGNVTESGCKECEELEEKNIKEFLQSFVHIVQMFINTSTTTPAPRPPTPAPTIASQPLSLRPEACRPAAGGAVHTRGLDFACDIYIWAPLAGTCGVLLLSLVITLYC

SEQ ID NO: 404 - protein, 723 aa, Artificial Sequence
  Synthetic
  MISC_FEATURE: NK77.25_CD70_DB02_D04
MALPVTALLLPLALLLHAARPDYKDDDDKGGGGSGGGGSQVQLVQSGAEVKKPGASVKVSCKASGYRLSDHYMHWVRQAPGQGLEWMGIINPSGGSTTYAQNFQGRVTMTRDTSTSTVYMELSSLRSEDTAVYYCASSYYGDYVLVNWGQGTLVTVSSGGGGSGGGGSGGGGSDIQMTQSPSSLSASVGDRVTITCQASQDISNYLNWYQQKPGKAPKLLIYAASTLESGVPSRFSGSGSGTDFTLTISSLQPEDFATYYCLQDYDYPLTFGQGTKLEIKTTTPAPRPPTPAPTIASQPLSLRPEACRPAAGGAVHTRGLDFACDIYIWAPLAGTCGVLLLSLVITLYCRRDQRLPPDAHKPPGGGSFRTPIQEEQADAHSTLAKIRVKFSRSADAPAYQQGQNQLYNELNLGRREEYDVLDKRRGRDPEMGGKPRRKNPQEGLYNELQKDKMAEAYSEIGMKGERRRGKGHDGLYQGLSTATKDTYDALHMQALPPRGSGEGRGSLLTCGDVEENPGPMALPVTALLLPLALLLHAARPNWVNVISDLKKIEDLIQSMHIDATLYTESDVHPSCKVTAMKCFLLELQVISLESGDASIHDTVENLIILANNSLSSNGNVTESGCKECEELEEKNIKEFLQSFVHIVQMFINTSTTTPAPRPPTPAPTIASQPLSLRPEACRPAAGGAVHTRGLDFACDIYIWAPLAGTCGVLLLSLVITLYC

SEQ ID NO: 405 - protein, 724 aa, Artificial Sequence
  Synthetic
  MISC_FEATURE: NK77.26_CD70_DB02_D10
MALPVTALLLPLALLLHAARPDYKDDDDKGGGGSGGGGSQVQLVQSGAEVKKPGASVKVSCKASGYTFTDYYVHWVRQAPGQGLEWMGWINPNTGGTSFAQNFQGRVTMTRDTSTSTVYMELSSLRSEDTAVYYCARDLGQWLGEIDYWGQGTLVTVSSGGGGSGGGGSGGGGSDIQMTQSPSSLSASVGDRVTITCRASQTIYKWLAWYQQKPGKAPKLLIYDASSLESGVPSRFSGSGSGTDFTLTISSLQPEDFATYYCQQANSFPFTFGPGTKVDIKTTTPAPRPPTPAPTIASQPLSLRPEACRPAAGGAVHTRGLDFACDIYIWAPLAGTCGVLLLSLVITLYCRRDQRLPPDAHKPPGGGSFRTPIQEEQADAHSTLAKIRVKFSRSADAPAYQQGQNQLYNELNLGRREEYDVLDKRRGRDPEMGGKPRRKNPQEGLYNELQKDKMAEAYSEIGMKGERRRGKGHDGLYQGLSTATKDTYDALHMQALPPRGSGEGRGSLLTCGDVEENPGPMALPVTALLLPLALLLHAARPNWVNVISDLKKIEDLIQSMHIDATLYTESDVHPSCKVTAMKCFLLELQVISLESGDASIHDTVENLIILANNSLSSNGNVTESGCKECEELEEKNIKEFLQSFVHIVQMFINTSTTTPAPRPPTPAPTIASQPLSLRPEACRPAAGGAVHTRGLDFACDIYIWAPLAGTCGVLLLSLVITLYC

SEQ ID NO: 406 - protein, 728 aa, Artificial Sequence
  Synthetic
  MISC_FEATURE: NK77.27_CD70_DB02_D11
MALPVTALLLPLALLLHAARPDYKDDDDKGGGGSGGGGSQVQLVQSGAEVKKPGASVKVSCKASGYTFTDYTDYFVHWVRQAPGQGLEWMGIFNPSDGSTSYAQEFQGRVTMTRDTSTSTVYMELSSLRSEDTAVYYCARGPYSSSWYYFDYWGQGTLVTVSSGGGGSGGGGSGGGGSDIQMTQSPSSLSASVGDRVTITCQASQDISNYLNWYQQKPGKAPKLLIYDASNLETGVPSRFSGSGSGTDFTLTISSLQPEDFATYYCQQAHSFPPTFGQGTKVEIKTTTPAPRPPTPAPTIASQPLSLRPEACRPAAGGAVHTRGLDFACDIYIWAPLAGTCGVLLLSLVITLYCRRDQRLPPDAHKPPGGGSFRTPIQEEQADAHSTLAKIRVKFSRSADAPAYQQGQNQLYNELNLGRREEYDVLDKRRGRDPEMGGKPRRKNPQEGLYNELQKDKMAEAYSEIGMKGERRRGKGHDGLYQGLSTATKDTYDALHMQALPPRGSGEGRGSLLTCGDVEENPGPMALPVTALLLPLALLLHAARPNWVNVISDLKKIEDLIQSMHIDATLYTESDVHPSCKVTAMKCFLLELQVISLESGDASIHDTVENLIILANNSLSSNGNVTESGCKECEELEEKNIKEFLQSFVHIVQMFINTSTTTPAPRPPTPAPTIASQPLSLRPEACRPAAGGAVHTRGLDFACDIYIWAPLAGTCGVLLLSLVITLYC

SEQ ID NO: 407 - protein, 724 aa, Artificial Sequence
  Synthetic
  MISC_FEATURE: NK77.28_CD70_DB02_E04
MALPVTALLLPLALLLHAARPDYKDDDDKGGGGSGGGGSQVQLVQSGAEVKKPGASVKVSCKASGYIFTDYYMHWVRQAPGQGLEWMGIINPSGGDTLYAQKFQGRVTMTRDTSTSTVYMELSSLRSEDTAVYYCAREGVGAMGVFDYWGQGTLVTVSSGGGGSGGGGSGGGGSDIQMTQSPSSLSASVGDRVTITCRASTSISDYVHWYQQKPGKAPKLLIYDASSLQSGVPSRFSGSGSGTDFTLTISSLQPEDFATYYCQQSDSTPPTFGGGTKVEIKTTTPAPRPPTPAPTIASQPLSLRPEACRPAAGGAVHTRGLDFACDIYIWAPLAGTCGVLLLSLVITLYCRRDQRLPPDAHKPPGGGSFRTPIQEEQADAHSTLAKIRVKFSRSADAPAYQQGQNQLYNELNLGRREEYDVLDKRRGRDPEMGGKPRRKNPQEGLYNELQKDKMAEAYSEIGMKGERRRGKGHDGLYQGLSTATKDTYDALHMQALPPRGSGEGRGSLLTCGDVEENPGPMALPVTALLLPLALLLHAARPNWVNVISDLKKIEDLIQSMHIDATLYTESDVHPSCKVTAMKCFLLELQVISLESGDASIHDTVENLIILANNSLSSNGNVTESGCKECEELEEKNIKEFLQSFVHIVQMFINTSTTTPAPRPPTPAPTIASQPLSLRPEACRPAAGGAVHTRGLDFACDIYIWAPLAGTCGVLLLSLVITLYC

SEQ ID NO: 408 - protein, 726 aa, Artificial Sequence
  Synthetic
  MISC_FEATURE: NK77.29_CD70_DB02_F06
MALPVTALLLPLALLLHAARPDYKDDDDKGGGGSGGGGSQVQLVQSGAEVKKPGASVKVSCKASGYTFTDHYIHWVRQAPGQGLEWMGWISAYNGKTNYAQKFQGRVTMTRDTSTSTVYMELSSLRSEDTAVYYCARDTIYYDFWSGYDYWGQGTLVTVSSGGGGSGGGGSGGGGSDIQMTQSPSSLSASVGDRVTITCRASQGISNNLNWYQQKPGKAPKLLIYYASTLQSGVPSRFSGSGSGTDFTLTISSLQPEDFATYYCQQSYSTPITFGQGTRLEIKTTTPAPRPPTPAPTIASQPLSLRPEACRPAAGGAVHTRGLDFACDIYIWAPLAGTCGVLLLSLVITLYCRRDQRLPPDAHKPPGGGSFRTPIQEEQADAHSTLAKIRVKFSRSADAPAYQQGQNQLYNELNLGRREEYDVLDKRRGRDPEMGGKPRRKNPQEGLYNELQKDKMAEAYSEIGMKGERRRGKGHDGLYQGLSTATKDTYDALHMQALPPRGSGEGRGSLLTCGDVEENPGPMALPVTALLLPLALLLHAARPNWVNVISDLKKIEDLIQSMHIDATLYTESDVHPSCKVTAMKCFLLELQVISLESGDASIHDTVENLIILANNSLSSNGNVTESGCKECEELEEKNIKEFLQSFVHIVQMFINTSTTTPAPRPPTPAPTIASQPLSLRPEACRPAAGGAVHTRGLDFACDIYIWAPLAGTCGVLLLSLVITLYC

SEQ ID NO: 409 - protein, 726 aa, Artificial Sequence
  Synthetic
  MISC_FEATURE: NK77.31_CD70_DB02_F08
MALPVTALLLPLALLLHAARPDYKDDDDKGGGGSGGGGSQVQLVQSGAEVKKPGASVKVSCKASGYTFTSYYMHWVRQAPGQGLEWMGIINPSGGATIYAQKFQGRVTMTRDTSTSTVYMELSSLRSEDTAVYYCARSRGDYYGSGDFDYWGQGTLVTVSSGGGGSGGGGSGGGGSDIQMTQSPSSLSASVGDRVTITCRASQTISNYLNWYQQKPGKAPKLLIYDASTLEAGVPSRFSGSGSGTDFTLTISSLQPEDFATYYCQQSYNPPYTFGQGTKLEIKTTTPAPRPPTPAPTIASQPLSLRPEACRPAAGGAVHTRGLDFACDIYIWAPLAGTCGVLLLSLVITLYCRRDQRLPPDAHKPPGGGSFRTPIQEEQADAHSTLAKIRVKFSRSADAPAYQQGQNQLYNELNLGRREEYDVLDKRRGRDPEMGGKPRRKNPQEGLYNELQKDKMAEAYSEIGMKGERRRGKGHDGLYQGLSTATKDTYDALHMQALPPRGSGEGRGSLLTCGDVEENPGPMALPVTALLLPLALLLHAARPNWVNVISDLKKIEDLIQSMHIDATLYTESDVHPSCKVTAMKCFLLELQVISLESGDASIHDTVENLIILANNSLSSNGNVTESGCKECEELEEKNIKEFLQSFVHIVQMFINTSTTTPAPRPPTPAPTIASQPLSLRPEACRPAAGGAVHTRGLDFACDIYIWAPLAGTCGVLLLSLVITLYC

SEQ ID NO: 410 - protein, 722 aa, Artificial Sequence
  Synthetic
  MISC_FEATURE: NK77.32_CD70_DB02_G07
MALPVTALLLPLALLLHAARPDYKDDDDKGGGGSGGGGSQVQLVQSGAEVKKPGASVKVSCKASGYTFTDYYMHWVRQAPGQGLEWMGIINPSGGSTSYAQKFQGRVTMTRDTSTSTVYMELSSLRSEDTAVYYCARGYFDHAFDIWGQGTMVTVSSGGGGSGGGGSGGGGSDIQMTQSPSSLSASVGDRVTITCRASQSISTYLNWYQQKPGKAPKLLIYDASNLEIGVPSRFSGSGSGTDFTLTISSLQPEDFATYYCQQSDSSPLTFGQGTKVEIKTTTPAPRPPTPAPTIASQPLSLRPEACRPAAGGAVHTRGLDFACDIYIWAPLAGTCGVLLLSLVITLYCRRDQRLPPDAHKPPGGGSFRTPIQEEQADAHSTLAKIRVKFSRSADAPAYQQGQNQLYNELNLGRREEYDVLDKRRGRDPEMGGKPRRKNPQEGLYNELQKDKMAEAYSEIGMKGERRRGKGHDGLYQGLSTATKDTYDALHMQALPPRGSGEGRGSLLTCGDVEENPGPMALPVTALLLPLALLLHAARPNWVNVISDLKKIEDLIQSMHIDATLYTESDVHPSCKVTAMKCFLLELQVISLESGDASIHDTVENLIILANNSLSSNGNVTESGCKECEELEEKNIKEFLQSFVHIVQMFINTSTTTPAPRPPTPAPTIASQPLSLRPEACRPAAGGAVHTRGLDFACDIYIWAPLAGTCGVLLLSLVITLYC

SEQ ID NO: 411 - protein, 728 aa, Artificial Sequence
  Synthetic
  MISC_FEATURE: NK77.33_CD70_DB02_H04
MALPVTALLLPLALLLHAARPDYKDDDDKGGGGSGGGGSQVQLVQSGAEVKKPGASVKVSCKASGYTFTGYYMHWVRQAPGQGLEWMGIINPSGGDTIYAQKFQGRVTMTRDTSTSTVYMELSSLRSEDTAVYYCARGDSSSWYDYYYYMDVWGKGTTVTVSSGGGGSGGGGSGGGGSDIQMTQSPSSLSASVGDRVTITCQASQDISNYLNWYQQKPGKAPKLLIYAASSLQSGVPSRFSGSGSGTDFTLTISSLQPEDFATYYCQQSYRTPLTFGGGTKVEIKTTTPAPRPPTPAPTIASQPLSLRPEACRPAAGGAVHTRGLDFACDIYIWAPLAGTCGVLLLSLVITLYCRRDQRLPPDAHKPPGGGSFRTPIQEEQADAHSTLAKIRVKFSRSADAPAYQQGQNQLYNELNLGRREEYDVLDKRRGRDPEMGGKPRRKNPQEGLYNELQKDKMAEAYSEIGMKGERRRGKGHDGLYQGLSTATKDTYDALHMQALPPRGSGEGRGSLLTCGDVEENPGPMALPVTALLLPLALLLHAARPNWVNVISDLKKIEDLIQSMHIDATLYTESDVHPSCKVTAMKCFLLELQVISLESGDASIHDTVENLIILANNSLSSNGNVTESGCKECEELEEKNIKEFLQSFVHIVQMFINTSTTTPAPRPPTPAPTIASQPLSLRPEACRPAAGGAVHTRGLDFACDIYIWAPLAGTCGVLLLSLVITLYC

SEQ ID NO: 412 - protein, 723 aa, Artificial Sequence
  Synthetic
  MISC_FEATURE: NK77.34_CD70_DB02_H05
MALPVTALLLPLALLLHAARPDYKDDDDKGGGGSGGGGSQVQLVQSGAEVKKPGASVKVSCKASGYTFTDYFTHWVRQAPGQGLEWMGWINTYDGNTNYAQKFQGRVTMTRDTSTSTVYMELSSLRSEDTAVYYCAREMEWLGQVDYWGQGTLVTVSSGGGGSGGGGSGGGGSDIQMTQSPSSLSASVGDRVTITCRASQDIRNDLGWYQQKPGKAPKLLIYAASNLETGVPSRFSGSGSGTDFTLTISSLQPEDFATYYCQQSYSAPFTFGPGTKVDIKTTTPAPRPPTPAPTIASQPLSLRPEACRPAAGGAVHTRGLDFACDIYIWAPLAGTCGVLLLSLVITLYCRRDQRLPPDAHKPPGGGSFRTPIQEEQADAHSTLAKIRVKFSRSADAPAYQQGQNQLYNELNLGRREEYDVLDKRRGRDPEMGGKPRRKNPQEGLYNELQKDKMAEAYSEIGMKGERRRGKGHDGLYQGLSTATKDTYDALHMQALPPRGSGEGRGSLLTCGDVEENPGPMALPVTALLLPLALLLHAARPNWVNVISDLKKIEDLIQSMHIDATLYTESDVHPSCKVTAMKCFLLELQVISLESGDASIHDTVENLIILANNSLSSNGNVTESGCKECEELEEKNIKEFLQSFVHIVQMFINTSTTTPAPRPPTPAPTIASQPLSLRPEACRPAAGGAVHTRGLDFACDIYIWAPLAGTCGVLLLSLVITLYC

SEQ ID NO: 413 - protein, 723 aa, Artificial Sequence
  Synthetic
  MISC_FEATURE: NK77.35_CD70_DB02_H08
MALPVTALLLPLALLLHAARPDYKDDDDKGGGGSGGGGSQVQLVQSGAEVKKPGASVKVSCKASGYTFTSYYIHWVRQAPGQGLEWMGRINPNGGGTNYAQKFQGRVTMTRDTSTSTVYMELSSLRSEDTAVYYCARGHRGGGGIDYWGQGTLVTVSSGGGGSGGGGSGGGGSDIQMTQSPSSLSASVGDRVTITCRASQEISNYLAWYQQKPGKAPKLLIYDASNLQTGVPSRFSGSGSGTDFTLTISSLQPEDFATYYCQQSYSTPFTFGPGTKVDIKTTTPAPRPPTPAPTIASQPLSLRPEACRPAAGGAVHTRGLDFACDIYIWAPLAGTCGVLLLSLVITLYCRRDQRLPPDAHKPPGGGSFRTPIQEEQADAHSTLAKIRVKFSRSADAPAYQQGQNQLYNELNLGRREEYDVLDKRRGRDPEMGGKPRRKNPQEGLYNELQKDKMAEAYSEIGMKGERRRGKGHDGLYQGLSTATKDTYDALHMQALPPRGSGEGRGSLLTCGDVEENPGPMALPVTALLLPLALLLHAARPNWVNVISDLKKIEDLIQSMHIDATLYTESDVHPSCKVTAMKCFLLELQVISLESGDASIHDTVENLIILANNSLSSNGNVTESGCKECEELEEKNIKEFLQSFVHIVQMFINTSTTTPAPRPPTPAPTIASQPLSLRPEACRPAAGGAVHTRGLDFACDIYIWAPLAGTCGVLLLSLVITLYC

SEQ ID NO: 414 - protein, 723 aa, Artificial Sequence
  Synthetic
  MISC_FEATURE: NK77.36_CD70_DB03_A06
MALPVTALLLPLALLLHAARPDYKDDDDKGGGGSGGGGSQVQLVQSGAEVKKPGASVKVSCKASGGTFSSYAISWVRQAPGQGLEWMGWISPNSGDTHYAQKFQGRVTMTRDTSTSTVYMELSSLRSEDTAVYYCARDWGSGWYVDYWGQGTLVTVSSGGGGSGGGGSGGGGSDIQMTQSPSSLSASVGDRVTITCQASQDISDSLNWYQQKPGKAPKLLIYSASSLQSGVPSRFSGSGSGTDFTLTISSLQPEDFATYYCQQSFTTPYTFGQGTKVEIKTTTPAPRPPTPAPTIASQPLSLRPEACRPAAGGAVHTRGLDFACDIYIWAPLAGTCGVLLLSLVITLYCRRDQRLPPDAHKPPGGGSFRTPIQEEQADAHSTLAKIRVKFSRSADAPAYQQGQNQLYNELNLGRREEYDVLDKRRGRDPEMGGKPRRKNPQEGLYNELQKDKMAEAYSEIGMKGERRRGKGHDGLYQGLSTATKDTYDALHMQALPPRGSGEGRGSLLTCGDVEENPGPMALPVTALLLPLALLLHAARPNWVNVISDLKKIEDLIQSMHIDATLYTESDVHPSCKVTAMKCFLLELQVISLESGDASIHDTVENLIILANNSLSSNGNVTESGCKECEELEEKNIKEFLQSFVHIVQMFINTSTTTPAPRPPTPAPTIASQPLSLRPEACRPAAGGAVHTRGLDFACDIYIWAPLAGTCGVLLLSLVITLYC

SEQ ID NO: 415 - protein, 723 aa, Artificial Sequence
  Synthetic
  MISC_FEATURE: NK77.37_CD70_DB03_A07
MALPVTALLLPLALLLHAARPDYKDDDDKGGGGSGGGGSQVQLVQSGAEVKKPGSSVKVSCKASGGTFNSYGISWVRQAPGQGLEWMGGIIPIFGTANYAQKFQGRVTITADESTSTAYMELSSLRSEDTAVYYCARDTYGDDAFDIWGQGTMVTVSSGGGGSGGGGSGGGGSDIQMTQSPSSLSASVGDRVTITCRASQSISSWLAWYQQKPGKAPKLLIYDASNLETGVPSRFSGSGSGTDFTLTISSLQPEDFATYYCQQNFSPPLTFGQGTRLEIKTTTPAPRPPTPAPTIASQPLSLRPEACRPAAGGAVHTRGLDFACDIYIWAPLAGTCGVLLLSLVITLYCRRDQRLPPDAHKPPGGGSFRTPIQEEQADAHSTLAKIRVKFSRSADAPAYQQGQNQLYNELNLGRREEYDVLDKRRGRDPEMGGKPRRKNPQEGLYNELQKDKMAEAYSEIGMKGERRRGKGHDGLYQGLSTATKDTYDALHMQALPPRGSGEGRGSLLTCGDVEENPGPMALPVTALLLPLALLLHAARPNWVNVISDLKKIEDLIQSMHIDATLYTESDVHPSCKVTAMKCFLLELQVISLESGDASIHDTVENLIILANNSLSSNGNVTESGCKECEELEEKNIKEFLQSFVHIVQMFINTSTTTPAPRPPTPAPTIASQPLSLRPEACRPAAGGAVHTRGLDFACDIYIWAPLAGTCGVLLLSLVITLYC

SEQ ID NO: 416 - protein, 728 aa, Artificial Sequence
  Synthetic
  MISC_FEATURE: NK77.38_CD70_DB03_A08
MALPVTALLLPLALLLHAARPDYKDDDDKGGGGSGGGGSQVQLVQSGAEVKKPGASVKVSCKASGYSFTSYYMHWVRQAPGQGLEWMGIINPSGGTTSYAQKFQGRVTMTRDTSTSTVYMELSSLRSEDTAVYYCARDNSPYSSSWWDYFDYWGQGTLVTVSSGGGGSGGGGSGGGGSDIQMTQSPSSLSASVGDRVTITCRASQDIRHYLAWYQQKPGKAPKLLIYDASSLQSGVPSRFSGSGSGTDFTLTISSLQPEDFATYYCQQTYDAPITFGQGTRLEIKTTTPAPRPPTPAPTIASQPLSLRPEACRPAAGGAVHTRGLDFACDIYIWAPLAGTCGVLLLSLVITLYCRRDQRLPPDAHKPPGGGSFRTPIQEEQADAHSTLAKIRVKFSRSADAPAYQQGQNQLYNELNLGRREEYDVLDKRRGRDPEMGGKPRRKNPQEGLYNELQKDKMAEAYSEIGMKGERRRGKGHDGLYQGLSTATKDTYDALHMQALPPRGSGEGRGSLLTCGDVEENPGPMALPVTALLLPLALLLHAARPNWVNVISDLKKIEDLIQSMHIDATLYTESDVHPSCKVTAMKCFLLELQVISLESGDASIHDTVENLIILANNSLSSNGNVTESGCKECEELEEKNIKEFLQSFVHIVQMFINTSTTTPAPRPPTPAPTIASQPLSLRPEACRPAAGGAVHTRGLDFACDIYIWAPLAGTCGVLLLSLVITLYC

SEQ ID NO: 417 - protein, 726 aa, Artificial Sequence
  Synthetic
  MISC_FEATURE: NK77.39_CD70_DB03_A09
MALPVTALLLPLALLLHAARPDYKDDDDKGGGGSGGGGSQVQLVQSGAEVKKPGASVKVSCKASGYTFTDYYIHWVRQAPGQGLEWMGWITPNSGYTYYAQNFQGRVTMTRDTSTSTVYMELSSLRSEDTAVYYCARNTDCYGDFLGLDVWGQGTTVTVSSGGGGSGGGGSGGGGSDIVMTQSPDSLAVSLGERATINCRASSSISNYLAWYQQKPGQPPKLLIYGASTRASGVPDRFSGSGSGTDFTLTISSLQAEDVAVYYCQQSYSTPLTFGQGTKVEIKTTTPAPRPPTPAPTIASQPLSLRPEACRPAAGGAVHTRGLDFACDIYIWAPLAGTCGVLLLSLVITLYCRRDQRLPPDAHKPPGGGSFRTPIQEEQADAHSTLAKIRVKFSRSADAPAYQQGQNQLYNELNLGRREEYDVLDKRRGRDPEMGGKPRRKNPQEGLYNELQKDKMAEAYSEIGMKGERRRGKGHDGLYQGLSTATKDTYDALHMQALPPRGSGEGRGSLLTCGDVEENPGPMALPVTALLLPLALLLHAARPNWVNVISDLKKIEDLIQSMHIDATLYTESDVHPSCKVTAMKCFLLELQVISLESGDASIHDTVENLIILANNSLSSNGNVTESGCKECEELEEKNIKEFLQSFVHIVQMFINTSTTTPAPRPPTPAPTIASQPLSLRPEACRPAAGGAVHTRGLDFACDIYIWAPLAGTCGVLLLSLVITLYC

SEQ ID NO: 418 - protein, 726 aa, Artificial Sequence
  Synthetic
  MISC_FEATURE: NK77.40_CD70_DB03_A11
MALPVTALLLPLALLLHAARPDYKDDDDKGGGGSGGGGSQVQLVQSGAEVKKPGASVKVSCKASGYTFNGYLMHWVRQAPGQGLEWMGIVNPSDGSTGYAQKFQGRVTMTRDTSTSTVYMELSSLRSEDTAVYYCAKDTGLRYFDWLLDYWGQGTLVTVSSGGGGSGGGGSGGGGSDIQMTQSPSSLSASVGDRVTITCRASQGITNFLAWYQQKPGKAPKLLIYDASNLETGVPSRFSGSGSGTDFTLTISSLQPEDFATYYCQQSYGAPLTFGQGTRLEIKTTTPAPRPPTPAPTIASQPLSLRPEACRPAAGGAVHTRGLDFACDIYIWAPLAGTCGVLLLSLVITLYCRRDQRLPPDAHKPPGGGSFRTPIQEEQADAHSTLAKIRVKFSRSADAPAYQQGQNQLYNELNLGRREEYDVLDKRRGRDPEMGGKPRRKNPQEGLYNELQKDKMAEAYSEIGMKGERRRGKGHDGLYQGLSTATKDTYDALHMQALPPRGSGEGRGSLLTCGDVEENPGPMALPVTALLLPLALLLHAARPNWVNVISDLKKIEDLIQSMHIDATLYTESDVHPSCKVTAMKCFLLELQVISLESGDASIHDTVENLIILANNSLSSNGNVTESGCKECEELEEKNIKEFLQSFVHIVQMFINTSTTTPAPRPPTPAPTIASQPLSLRPEACRPAAGGAVHTRGLDFACDIYIWAPLAGTCGVLLLSLVITLYC

SEQ ID NO: 419 - protein, 722 aa, Artificial Sequence
  Synthetic
  MISC_FEATURE: NK77.41_CD70_DB03_A12
MALPVTALLLPLALLLHAARPDYKDDDDKGGGGSGGGGSQVQLVQSGAEVKKPGASVKVSCKASGYTFTSYYMHWVRQAPGQGLEWMGIIDPSGGRTIYAQRFQGRVTMTRDTSTSTVYMELSSLRSEDTAVYYCARHEAGGIFDYWGQGTLVTVSSGGGGSGGGGSGGGGSDIQMTQSPSSLSASVGDRVTITCQASQDISNYLNWYQQKPGKAPKLLIYSASTLQSGVPSRFSGSGSGTDFTLTISSLQPEDFATYYCQQSYSSPYRFGQGTKVEIKTTTPAPRPPTPAPTIASQPLSLRPEACRPAAGGAVHTRGLDFACDIYIWAPLAGTCGVLLLSLVITLYCRRDQRLPPDAHKPPGGGSFRTPIQEEQADAHSTLAKIRVKFSRSADAPAYQQGQNQLYNELNLGRREEYDVLDKRRGRDPEMGGKPRRKNPQEGLYNELQKDKMAEAYSEIGMKGERRRGKGHDGLYQGLSTATKDTYDALHMQALPPRGSGEGRGSLLTCGDVEENPGPMALPVTALLLPLALLLHAARPNWVNVISDLKKIEDLIQSMHIDATLYTESDVHPSCKVTAMKCFLLELQVISLESGDASIHDTVENLIILANNSLSSNGNVTESGCKECEELEEKNIKEFLQSFVHIVQMFINTSTTTPAPRPPTPAPTIASQPLSLRPEACRPAAGGAVHTRGLDFACDIYIWAPLAGTCGVLLLSLVITLYC

SEQ ID NO: 420 - protein, 730 aa, Artificial Sequence
  Synthetic
  MISC_FEATURE: NK77.42_CD70_DB03_B01
MALPVTALLLPLALLLHAARPDYKDDDDKGGGGSGGGGSQVQLVQSGAEVKKPGSSVKVSCKASGYTFSDSYMHWVRQAPGQGLEWVGGIIPMAGIPAYAEEFQGRVTITADESTSTAYMELSSLRSEDTAVYYCARADDYGGNWYFDLWGRGTLVTVSSGGGGSGGGGSGGGGSDIVMTQSPLSLPVTPGEPASISCRSSQSLLHSNGYNYLDWYLQKPGQSPQLLIYAASSLQSGVPDRFSGSGSGTDFTLKISRVEAEDVGVYYCMQGAHWPPTFGQGTKLEIKTTTPAPRPPTPAPTIASQPLSLRPEACRPAAGGAVHTRGLDFACDIYIWAPLAGTCGVLLLSLVITLYCRRDQRLPPDAHKPPGGGSFRTPIQEEQADAHSTLAKIRVKFSRSADAPAYQQGQNQLYNELNLGRREEYDVLDKRRGRDPEMGGKPRRKNPQEGLYNELQKDKMAEAYSEIGMKGERRRGKGHDGLYQGLSTATKDTYDALHMQALPPRGSGEGRGSLLTCGDVEENPGPMALPVTALLLPLALLLHAARPNWVNVISDLKKIEDLIQSMHIDATLYTESDVHPSCKVTAMKCFLLELQVISLESGDASIHDTVENLIILANNSLSSNGNVTESGCKECEELEEKNIKEFLQSFVHIVQMFINTSTTTPAPRPPTPAPTIASQPLSLRPEACRPAAGGAVHTRGLDFACDIYIWAPLAGTCGVLLLSLVITLYC

SEQ ID NO: 421 - protein, 724 aa, Artificial Sequence
  Synthetic
  MISC_FEATURE: NK77.43_CD70_DB03_B04
MALPVTALLLPLALLLHAARPDYKDDDDKGGGGSGGGGSQVQLVQSGAEVKKPGASVKVSCKASGYIFTDYYMHWVRQAPGQGLEWMGIINPSGGSTSYAQKFQGRVTMTRDTSTSTVYMELSSLRSEDTAVYYCARDSGWYESWFDPWGQGTLVTVSSGGGGSGGGGSGGGGSDIQMTQSPSSLSASVGDRVTITCRASQDIRDGLGWYQQKPGKAPKLLIYAASTLQSGVPSRFSGSGSGTDFTLTISSLQPEDFATYYCQQSYGTPPTFGQGTKVEIKTTTPAPRPPTPAPTIASQPLSLRPEACRPAAGGAVHTRGLDFACDIYIWAPLAGTCGVLLLSLVITLYCRRDQRLPPDAHKPPGGGSFRTPIQEEQADAHSTLAKIRVKFSRSADAPAYQQGQNQLYNELNLGRREEYDVLDKRRGRDPEMGGKPRRKNPQEGLYNELQKDKMAEAYSEIGMKGERRRGKGHDGLYQGLSTATKDTYDALHMQALPPRGSGEGRGSLLTCGDVEENPGPMALPVTALLLPLALLLHAARPNWVNVISDLKKIEDLIQSMHIDATLYTESDVHPSCKVTAMKCFLLELQVISLESGDASIHDTVENLIILANNSLSSNGNVTESGCKECEELEEKNIKEFLQSFVHIVQMFINTSTTTPAPRPPTPAPTIASQPLSLRPEACRPAAGGAVHTRGLDFACDIYIWAPLAGTCGVLLLSLVITLYC

SEQ ID NO: 422 - protein, 725 aa, Artificial Sequence
  Synthetic
  MISC_FEATURE: NK77.44_CD70_DB03_B06
MALPVTALLLPLALLLHAARPDYKDDDDKGGGGSGGGGSQVQLVQSGAEVKKPGASVKVSCKASGYTFTDYYLHWVRQAPGQGLEWMGWISAYNGNTNYAQKFQGRVTMTRDTSTSTVYMELSSLRSEDTAVYYCAREIVGATEDWYFDLWGRGTLVTVSSGGGGSGGGGSGGGGSEIVMTQSPATLSVSPGERATLSCRASQSVSSYLAWYQQKPGQAPRLLIYGASTRATGIPARFSGSGSGTEFTLTISSLQSEDFAVYYCQQYDSSPTFGQGTKVEIKTTTPAPRPPTPAPTIASQPLSLRPEACRPAAGGAVHTRGLDFACDIYIWAPLAGTCGVLLLSLVITLYCRRDQRLPPDAHKPPGGGSFRTPIQEEQADAHSTLAKIRVKFSRSADAPAYQQGQNQLYNELNLGRREEYDVLDKRRGRDPEMGGKPRRKNPQEGLYNELQKDKMAEAYSEIGMKGERRRGKGHDGLYQGLSTATKDTYDALHMQALPPRGSGEGRGSLLTCGDVEENPGPMALPVTALLLPLALLLHAARPNWVNVISDLKKIEDLIQSMHIDATLYTESDVHPSCKVTAMKCFLLELQVISLESGDASIHDTVENLIILANNSLSSNGNVTESGCKECEELEEKNIKEFLQSFVHIVQMFINTSTTTPAPRPPTPAPTIASQPLSLRPEACRPAAGGAVHTRGLDFACDIYIWAPLAGTCGVLLLSLVITLYC

SEQ ID NO: 423 - protein, 723 aa, Artificial Sequence
  v
  MISC_FEATURE: NK77.45_CD70_DB03_B09
MALPVTALLLPLALLLHAARPDYKDDDDKGGGGSGGGGSQVQLVQSGAEVKKPGASVKVSCKASGYTFTAYYLHWVRQAPGQGLEWMGMINPNNGGTIYAQTFQGRVTMTRDTSTSTVYMELSSLRSEDTAVYYCARDLGGYVLFDYWGQGTLVTVSSGGGGSGGGGSGGGGSDIQMTQSPSSLSASVGDRVTITCRASQSISSYLNWYQQKPGKAPKLLIYDASNLETGVPSRFSGSGSGTDFTLTISSLQPEDFATYYCQQSHSAPITFGQGTRLEIKTTTPAPRPPTPAPTIASQPLSLRPEACRPAAGGAVHTRGLDFACDIYIWAPLAGTCGVLLLSLVITLYCRRDQRLPPDAHKPPGGGSFRTPIQEEQADAHSTLAKIRVKFSRSADAPAYQQGQNQLYNELNLGRREEYDVLDKRRGRDPEMGGKPRRKNPQEGLYNELQKDKMAEAYSEIGMKGERRRGKGHDGLYQGLSTATKDTYDALHMQALPPRGSGEGRGSLLTCGDVEENPGPMALPVTALLLPLALLLHAARPNWVNVISDLKKIEDLIQSMHIDATLYTESDVHPSCKVTAMKCFLLELQVISLESGDASIHDTVENLIILANNSLSSNGNVTESGCKECEELEEKNIKEFLQSFVHIVQMFINTSTTTPAPRPPTPAPTIASQPLSLRPEACRPAAGGAVHTRGLDFACDIYIWAPLAGTCGVLLLSLVITLYC

SEQ ID NO: 424 - protein, 723 aa, Artificial Sequence
  Synthetic
  MISC_FEATURE: NK77.46_CD70_DB03_C05
MALPVTALLLPLALLLHAARPDYKDDDDKGGGGSGGGGSQVQLVQSGAEVKKPGASVKVSCKASGYTFTDYYIHWVRQAPGQGLEWMGMINPRGGSTTYAQSFQGRVTMTRDTSTSTVYMELSSLRSEDTAVYYCARDLGDYGDYDYWGQGTLVTVSSGGGGSGGGGSGGGGSDIQMTQSPSSLSASVGDRVTITCRASQSISTNLAWYQQKPGKAPKLLIYDASYLEAGVPSRFSGSGSGTDFTLTISSLQPEDFATYYCQQSYSTPPTFGQGTKLEIKTTTPAPRPPTPAPTIASQPLSLRPEACRPAAGGAVHTRGLDFACDIYIWAPLAGTCGVLLLSLVITLYCRRDQRLPPDAHKPPGGGSFRTPIQEEQADAHSTLAKIRVKFSRSADAPAYQQGQNQLYNELNLGRREEYDVLDKRRGRDPEMGGKPRRKNPQEGLYNELQKDKMAEAYSEIGMKGERRRGKGHDGLYQGLSTATKDTYDALHMQALPPRGSGEGRGSLLTCGDVEENPGPMALPVTALLLPLALLLHAARPNWVNVISDLKKIEDLIQSMHIDATLYTESDVHPSCKVTAMKCFLLELQVISLESGDASIHDTVENLIILANNSLSSNGNVTESGCKECEELEEKNIKEFLQSFVHIVQMFINTSTTTPAPRPPTPAPTIASQPLSLRPEACRPAAGGAVHTRGLDFACDIYIWAPLAGTCGVLLLSLVITLYC

SEQ ID NO: 425 - protein, 734 aa, Artificial Sequence
  Synthetic
  MISC_FEATURE: NK77.47_CD70_DB03_D11
MALPVTALLLPLALLLHAARPDYKDDDDKGGGGSGGGGSEVQLLESGGGLVQPGGSLRLSCAASGFTFSNSDMNWVRQAPGKGLEWVSAISGGGDTLYYADSVKGRFTISRDNSKNTLYLQMNSLRAEDTAVYYCAMASALDSSGDNEAFDIWGQGTTVTVSSGGGGSGGGGSGGGGSDIVMTQSPDSLAVSLGERATINCKSSQSVLYSSNNKNYLAWYQQKPGQPPKLLIYWASTRDSGVPDRFSGSGSGTDFTLTISSLQAEDVAVYYCQQYYGFPPTFGQGTRLEIKTTTPAPRPPTPAPTIASQPLSLRPEACRPAAGGAVHTRGLDFACDIYIWAPLAGTCGVLLLSLVITLYCRRDQRLPPDAHKPPGGGSFRTPIQEEQADAHSTLAKIRVKFSRSADAPAYQQGQNQLYNELNLGRREEYDVLDKRRGRDPEMGGKPRRKNPQEGLYNELQKDKMAEAYSEIGMKGERRRGKGHDGLYQGLSTATKDTYDALHMQALPPRGSGEGRGSLLTCGDVEENPGPMALPVTALLLPLALLLHAARPNWVNVISDLKKIEDLIQSMHIDATLYTESDVHPSCKVTAMKCFLLELQVISLESGDASIHDTVENLIILANNSLSSNGNVTESGCKECEELEEKNIKEFLQSFVHIVQMFINTSTTTPAPRPPTPAPTIASQPLSLRPEACRPAAGGAVHTRGLDFACDIYIWAPLAGTCGVLLLSLVITLYC

SEQ ID NO: 426 - protein, 726 aa, Artificial Sequence
  Synthetic
  MISC_FEATURE: NK77.48_CD70_DB03_E01
MALPVTALLLPLALLLHAARPDYKDDDDKGGGGSGGGGSQVQLVQSGAEVKKPGASVKVSCKASGYTFTSYYMHWVRQAPGQGLEWMGWINPNNGGTSYAQKFQGRVTMTRDTSTSTVYMELSSLRSEDTAVYYCARVEDDFWSGPSFDYWGQGTLVTVSSGGGGSGGGGSGGGGSDIQMTQSPSSLSASVGDRVTITCQASHDISKFLNWYQQKPGKAPKLLIYDASNLQRGVPSRFSGSGSGTDFTLTISSLQPEDFATYYCQQTYSFPFTFGQGTKLEIKTTTPAPRPPTPAPTIASQPLSLRPEACRPAAGGAVHTRGLDFACDIYIWAPLAGTCGVLLLSLVITLYCRRDQRLPPDAHKPPGGGSFRTPIQEEQADAHSTLAKIRVKFSRSADAPAYQQGQNQLYNELNLGRREEYDVLDKRRGRDPEMGGKPRRKNPQEGLYNELQKDKMAEAYSEIGMKGERRRGKGHDGLYQGLSTATKDTYDALHMQALPPRGSGEGRGSLLTCGDVEENPGPMALPVTALLLPLALLLHAARPNWVNVISDLKKIEDLIQSMHIDATLYTESDVHPSCKVTAMKCFLLELQVISLESGDASIHDTVENLIILANNSLSSNGNVTESGCKECEELEEKNIKEFLQSFVHIVQMFINTSTTTPAPRPPTPAPTIASQPLSLRPEACRPAAGGAVHTRGLDFACDIYIWAPLAGTCGVLLLSLVITLYC

SEQ ID NO: 427 - protein, 728 aa, Artificial Sequence
  Synthetic
  MISC_FEATURE: NK77.49_CD70_DB03_E03
MALPVTALLLPLALLLHAARPDYKDDDDKGGGGSGGGGSQVQLVQSGAEVKKPGSSVKVSCKASGGTFTNYAFSWVRQAPGQGLEWMGGIIPISGAANYAQKFQGRVTITADESTSTAYMELSSLRSEDTAVYYCARGSGLDDAFDIWGQGTMVTVSSGGGGSGGGGSGGGGSDIVMTQSPLSLPVTPGEPASISCRSSQSLLHSNGYNYLDWYLQKPGQSPQLLIYDASSLQSGVPDRFSGSGSGTDFTLKISRVEAEDVGVYYCMQARQTPLTFGQGTRLEIKTTTPAPRPPTPAPTIASQPLSLRPEACRPAAGGAVHTRGLDFACDIYIWAPLAGTCGVLLLSLVITLYCRRDQRLPPDAHKPPGGGSFRTPIQEEQADAHSTLAKIRVKFSRSADAPAYQQGQNQLYNELNLGRREEYDVLDKRRGRDPEMGGKPRRKNPQEGLYNELQKDKMAEAYSEIGMKGERRRGKGHDGLYQGLSTATKDTYDALHMQALPPRGSGEGRGSLLTCGDVEENPGPMALPVTALLLPLALLLHAARPNWVNVISDLKKIEDLIQSMHIDATLYTESDVHPSCKVTAMKCFLLELQVISLESGDASIHDTVENLIILANNSLSSNGNVTESGCKECEELEEKNIKEFLQSFVHIVQMFINTSTTTPAPRPPTPAPTIASQPLSLRPEACRPAAGGAVHTRGLDFACDIYIWAPLAGTCGVLLLSLVITLYC

SEQ ID NO: 428 - protein, 738 aa, Artificial Sequence
  Synthetic
  MISC_FEATURE: NK77.50_CD70_DB03_E09
MALPVTALLLPLALLLHAARPDYKDDDDKGGGGSGGGGSQVQLVQSGAEVKKPGASVKVSCKASGYTFTAYYMHWVRQAPGQGLEWMGWMNPNSGNTGYAQKFQGRVTMTRDTSTSTVYMELSSLRSEDTAVYYCAREGRIDYGDYDDYYYYYGMDVWGQGTTVTVSSGGGGSGGGGSGGGGSDIVMTQSPLSLPVTPGEPASISCRSSQSLLHSNGYNYLDWYLQKPGQSPQLLIYAASNLQGGVPDRFSGSGSGTDFTLKISRVEAEDVGVYYCMQTLESPVTFGGGTKVEIKTTTPAPRPPTPAPTIASQPLSLRPEACRPAAGGAVHTRGLDFACDIYIWAPLAGTCGVLLLSLVITLYCRRDQRLPPDAHKPPGGGSFRTPIQEEQADAHSTLAKIRVKFSRSADAPAYQQGQNQLYNELNLGRREEYDVLDKRRGRDPEMGGKPRRKNPQEGLYNELQKDKMAEAYSEIGMKGERRRGKGHDGLYQGLSTATKDTYDALHMQALPPRGSGEGRGSLLTCGDVEENPGPMALPVTALLLPLALLLHAARPNWVNVISDLKKIEDLIQSMHIDATLYTESDVHPSCKVTAMKCFLLELQVISLESGDASIHDTVENLIILANNSLSSNGNVTESGCKECEELEEKNIKEFLQSFVHIVQMFINTSTTTPAPRPPTPAPTIASQPLSLRPEACRPAAGGAVHTRGLDFACDIYIWAPLAGTCGVLLLSLVITLYC

SEQ ID NO: 429 - protein, 724 aa, Artificial Sequence
  Synthetic
  MISC_FEATURE: NK77.51_CD70_DB03_F02
MALPVTALLLPLALLLHAARPDYKDDDDKGGGGSGGGGSQVQLVQSGAEVKKPGASVKVSCKASGYTFTDYYVHWVRQAPGQGLEWMGTINPSGGSTSYAQKFQGRVTMTRDTSTSTVYMELSSLRSEDTAVYYCARDQGLWFTGFDYWGQGTLVTVSSGGGGSGGGGSGGGGSDIQMTQSPSSLSASVGDRVTITCRASQGISNNLNWYQQKPGKAPKLLIYDASNLERGVPSRFSGSGSGTDFTLTISSLQPEDFATYYCQQSYDGPITFGQGTRLEIKTTTPAPRPPTPAPTIASQPLSLRPEACRPAAGGAVHTRGLDFACDIYIWAPLAGTCGVLLLSLVITLYCRRDQRLPPDAHKPPGGGSFRTPIQEEQADAHSTLAKIRVKFSRSADAPAYQQGQNQLYNELNLGRREEYDVLDKRRGRDPEMGGKPRRKNPQEGLYNELQKDKMAEAYSEIGMKGERRRGKGHDGLYQGLSTATKDTYDALHMQALPPRGSGEGRGSLLTCGDVEENPGPMALPVTALLLPLALLLHAARPNWVNVISDLKKIEDLIQSMHIDATLYTESDVHPSCKVTAMKCFLLELQVISLESGDASIHDTVENLIILANNSLSSNGNVTESGCKECEELEEKNIKEFLQSFVHIVQMFINTSTTTPAPRPPTPAPTIASQPLSLRPEACRPAAGGAVHTRGLDFACDIYIWAPLAGTCGVLLLSLVITLYC

SEQ ID NO: 430 - protein, 724 aa, Artificial Sequence
  v
  MISC_FEATURE: NK77.52_CD70_DB03_F05
MALPVTALLLPLALLLHAARPDYKDDDDKGGGGSGGGGSQVQLVQSGAEVKKPGASVKVSCKASGYTFTAYHMHWVRQAPGQGLEWMGIINPGDGATGYAQNLQGRVTMTRDTSTSTVYMELSSLRSEDTAVYYCAGEGISGSDAFDIWGQGTLVTVSSGGGGSGGGGSGGGGSDIQMTQSPSSLSASVGDRVTITCRASQSISSWLAWYQQKPGKAPKLLIYAASSLQSGVPSRFSGSGSGTDFTLTISSLQPEDFATYYCLQDYSYPLTFGGGTKVEIKTTTPAPRPPTPAPTIASQPLSLRPEACRPAAGGAVHTRGLDFACDIYIWAPLAGTCGVLLLSLVITLYCRRDQRLPPDAHKPPGGGSFRTPIQEEQADAHSTLAKIRVKFSRSADAPAYQQGQNQLYNELNLGRREEYDVLDKRRGRDPEMGGKPRRKNPQEGLYNELQKDKMAEAYSEIGMKGERRRGKGHDGLYQGLSTATKDTYDALHMQALPPRGSGEGRGSLLTCGDVEENPGPMALPVTALLLPLALLLHAARPNWVNVISDLKKIEDLIQSMHIDATLYTESDVHPSCKVTAMKCFLLELQVISLESGDASIHDTVENLIILANNSLSSNGNVTESGCKECEELEEKNIKEFLQSFVHIVQMFINTSTTTPAPRPPTPAPTIASQPLSLRPEACRPAAGGAVHTRGLDFACDIYIWAPLAGTCGVLLLSLVITLYC

SEQ ID NO: 431 - protein, 722 aa, Artificial Sequence
  Synthetic
  MISC_FEATURE: NK77.53_CD70_DB03_F06
MALPVTALLLPLALLLHAARPDYKDDDDKGGGGSGGGGSQVQLVQSGAEVKKPGSSVKVSCKASGGTFSSYAISWVRQAPGQGLEWMGWMNPNSGNTGYAQKFQGRVTITADESTSTAYMELSSLRSEDTAVYYCAWGVDPYYFDYWGQGTLVTVSSGGGGSGGGGSGGGGSDIQMTQSPSSLSASVGDRVTITCRASQSINRWLAWYQQKPGKAPKLLIYDASNLETGVPSRFSGSGSGTDFTLTISSLQPEDFATYYCQQSYITPLTFGGGTKVEIKTTTPAPRPPTPAPTIASQPLSLRPEACRPAAGGAVHTRGLDFACDIYIWAPLAGTCGVLLLSLVITLYCRRDQRLPPDAHKPPGGGSFRTPIQEEQADAHSTLAKIRVKFSRSADAPAYQQGQNQLYNELNLGRREEYDVLDKRRGRDPEMGGKPRRKNPQEGLYNELQKDKMAEAYSEIGMKGERRRGKGHDGLYQGLSTATKDTYDALHMQALPPRGSGEGRGSLLTCGDVEENPGPMALPVTALLLPLALLLHAARPNWVNVISDLKKIEDLIQSMHIDATLYTESDVHPSCKVTAMKCFLLELQVISLESGDASIHDTVENLIILANNSLSSNGNVTESGCKECEELEEKNIKEFLQSFVHIVQMFINTSTTTPAPRPPTPAPTIASQPLSLRPEACRPAAGGAVHTRGLDFACDIYIWAPLAGTCGVLLLSLVITLYC

SEQ ID NO: 432 - protein, 722 aa, Artificial Sequence
  Synthetic
  MISC_FEATURE: NK77.54_CD70_DB03_F09
MALPVTALLLPLALLLHAARPDYKDDDDKGGGGSGGGGSQVQLVQSGAEVKKPGASVKVSCKASGYTFTSYYMHWVRQAPGQGLEWMGIFNPSDGSTSYAQKFQGRVTMTRDTSTSTVYMELSSLRSEDTAVYYCARDVGETTFDPWGQGTLVTVSSGGGGSGGGGSGGGGSDIQMTQSPSSLSASVGDRVTITCQASQDISNYLNWYQQKPGKAPKLLIYDASSLESGVPSRFSGSGSGTDFTLTISSLQPEDFATYYCQQTNSFPITFGQGTRLEIKTTTPAPRPPTPAPTIASQPLSLRPEACRPAAGGAVHTRGLDFACDIYIWAPLAGTCGVLLLSLVITLYCRRDQRLPPDAHKPPGGGSFRTPIQEEQADAHSTLAKIRVKFSRSADAPAYQQGQNQLYNELNLGRREEYDVLDKRRGRDPEMGGKPRRKNPQEGLYNELQKDKMAEAYSEIGMKGERRRGKGHDGLYQGLSTATKDTYDALHMQALPPRGSGEGRGSLLTCGDVEENPGPMALPVTALLLPLALLLHAARPNWVNVISDLKKIEDLIQSMHIDATLYTESDVHPSCKVTAMKCFLLELQVISLESGDASIHDTVENLIILANNSLSSNGNVTESGCKECEELEEKNIKEFLQSFVHIVQMFINTSTTTPAPRPPTPAPTIASQPLSLRPEACRPAAGGAVHTRGLDFACDIYIWAPLAGTCGVLLLSLVITLYC

SEQ ID NO: 433 - protein, 727 aa, Artificial Sequence
  Synthetic
  MISC_FEATURE: NK77.55_CD70_DB03_F12
MALPVTALLLPLALLLHAARPDYKDDDDKGGGGSGGGGSQVQLVQSGAEVKKPGASVKVSCKASGYTFTSYGISWVRQAPGQGLEWMGWISAYNGHTNYAQKFQGRVTMTRDTSTSTVYMELSSLRSEDTAVYYCARDSVRGWDYYYGMGVWGQGTTVTVSSGGGGSGGGGSGGGGSDIQMTQSPSSLSASVGDRVTITCQASQDIRNFLNWYQQKPGKAPKLLIYAASTLQSGVPSRFSGSGSGTDFTLTISSLQPEDFATYYCQQSYSAPSTFGQGTKLEIKTTTPAPRPPTPAPTIASQPLSLRPEACRPAAGGAVHTRGLDFACDIYIWAPLAGTCGVLLLSLVITLYCRRDQRLPPDAHKPPGGGSFRTPIQEEQADAHSTLAKIRVKFSRSADAPAYQQGQNQLYNELNLGRREEYDVLDKRRGRDPEMGGKPRRKNPQEGLYNELQKDKMAEAYSEIGMKGERRRGKGHDGLYQGLSTATKDTYDALHMQALPPRGSGEGRGSLLTCGDVEENPGPMALPVTALLLPLALLLHAARPNWVNVISDLKKIEDLIQSMHIDATLYTESDVHPSCKVTAMKCFLLELQVISLESGDASIHDTVENLIILANNSLSSNGNVTESGCKECEELEEKNIKEFLQSFVHIVQMFINTSTTTPAPRPPTPAPTIASQPLSLRPEACRPAAGGAVHTRGLDFACDIYIWAPLAGTCGVLLLSLVITLYC

SEQ ID NO: 434 - protein, 724 aa, Artificial Sequence
  Synthetic
  MISC_FEATURE: NK77.56_CD70_DB03_G06
MALPVTALLLPLALLLHAARPDYKDDDDKGGGGSGGGGSQVQLVQSGAEVKKPGSSVKVSCKASGYTFIDYYMHWVRQAPGQGLEWMGWMNPHSGNSDNAPKFQGRVTITADESTSTAYMELSSLRSEDTAVYYCARGYSGYDLTADYWGQGTLVTVSSGGGGSGGGGSGGGGSDIQMTQSPSSLSASVGDRVTITCRASQSISNYLNWYQQKPGKAPKLLIYDASNLETGVPSRFSGSGSGTDFTLTISSLQPEDFATYYCQQSYSTPITFGQGTRLEIKTTTPAPRPPTPAPTIASQPLSLRPEACRPAAGGAVHTRGLDFACDIYIWAPLAGTCGVLLLSLVITLYCRRDQRLPPDAHKPPGGGSFRTPIQEEQADAHSTLAKIRVKFSRSADAPAYQQGQNQLYNELNLGRREEYDVLDKRRGRDPEMGGKPRRKNPQEGLYNELQKDKMAEAYSEIGMKGERRRGKGHDGLYQGLSTATKDTYDALHMQALPPRGSGEGRGSLLTCGDVEENPGPMALPVTALLLPLALLLHAARPNWVNVISDLKKIEDLIQSMHIDATLYTESDVHPSCKVTAMKCFLLELQVISLESGDASIHDTVENLIILANNSLSSNGNVTESGCKECEELEEKNIKEFLQSFVHIVQMFINTSTTTPAPRPPTPAPTIASQPLSLRPEACRPAAGGAVHTRGLDFACDIYIWAPLAGTCGVLLLSLVITLYC

SEQ ID NO: 435 - protein, 733 aa, Artificial Sequence
  Synthetic
  MISC_FEATURE: NK77.57_CD70_DB03_G11
MALPVTALLLPLALLLHAARPDYKDDDDKGGGGSGGGGSQVQLVQSGAEVKKPGASVKVSCKASGYTFTGQYMHWVRQAPGQGLEWMGWINPNTGDTNYAQKFQGRVTMTRDTSTSTVYMELSSLRSEDTAVYYCARDSVFEVEGGTDYYYYYGMDVWGQGTMVTVSSGGGGSGGGGSGGGGSDIQMTQSPSSLSASVGDRVTITCRASETISGWLAWYQQKPGKAPKLLIYDASNLETGVPSRFSGSGSGTDFTLTISSLQPEDFATYYCQQSYSTPWTFGQGTKLEIKTTTPAPRPPTPAPTIASQPLSLRPEACRPAAGGAVHTRGLDFACDIYIWAPLAGTCGVLLLSLVITLYCRRDQRLPPDAHKPPGGGSFRTPIQEEQADAHSTLAKIRVKFSRSADAPAYQQGQNQLYNELNLGRREEYDVLDKRRGRDPEMGGKPRRKNPQEGLYNELQKDKMAEAYSEIGMKGERRRGKGHDGLYQGLSTATKDTYDALHMQALPPRGSGEGRGSLLTCGDVEENPGPMALPVTALLLPLALLLHAARPNWVNVISDLKKIEDLIQSMHIDATLYTESDVHPSCKVTAMKCFLLELQVISLESGDASIHDTVENLIILANNSLSSNGNVTESGCKECEELEEKNIKEFLQSFVHIVQMFINTSTTTPAPRPPTPAPTIASQPLSLRPEACRPAAGGAVHTRGLDFACDIYIWAPLAGTCGVLLLSLVITLYC

SEQ ID NO: 436 - protein, 723 aa, Artificial Sequence
  Synthetic
  MISC_FEATURE: NK77.58_CD70_DB03_H08
MALPVTALLLPLALLLHAARPDYKDDDDKGGGGSGGGGSQVQLVQSGAEVKKPGASVKVSCKASGYTFTSYDINWVRQAPGQGLEWMGVINPSGGGTSYAQKFQGRVTMTRDTSTSTVYMELSSLRSEDTAVYYCARYSGYDWVFDYWGQGTLVTVSSGGGGSGGGGSGGGGSDIQMTQSPSSLSASVGDRVTITCRASQGIGSWLAWYQQKPGKAPKLLIYAASTLQSGVPSRFSGSGSGTDFTLTISSLQPEDFATYYCQQSYSTPWTFGPGTKVDIKTTTPAPRPPTPAPTIASQPLSLRPEACRPAAGGAVHTRGLDFACDIYIWAPLAGTCGVLLLSLVITLYCRRDQRLPPDAHKPPGGGSFRTPIQEEQADAHSTLAKIRVKFSRSADAPAYQQGQNQLYNELNLGRREEYDVLDKRRGRDPEMGGKPRRKNPQEGLYNELQKDKMAEAYSEIGMKGERRRGKGHDGLYQGLSTATKDTYDALHMQALPPRGSGEGRGSLLTCGDVEENPGPMALPVTALLLPLALLLHAARPNWVNVISDLKKIEDLIQSMHIDATLYTESDVHPSCKVTAMKCFLLELQVISLESGDASIHDTVENLIILANNSLSSNGNVTESGCKECEELEEKNIKEFLQSFVHIVQMFINTSTTTPAPRPPTPAPTIASQPLSLRPEACRPAAGGAVHTRGLDFACDIYIWAPLAGTCGVLLLSLVITLYC

SEQ ID NO: 437 - protein, 724 aa, Artificial Sequence
  Synthetic
  MISC_FEATURE: NK77.59_CD70_DB03_H10
MALPVTALLLPLALLLHAARPDYKDDDDKGGGGSGGGGSQVQLVQSGAEVKKPGASVKVSCKASGYTFANYYMHWVRQAPGQGLEWMGIINPSGGSTSYAQKFQGRVTMTRDTSTSTVYMELSSLRSEDTAVYYCARDSGSYFGWFDPWGQGTLVTVSSGGGGSGGGGSGGGGSDIQMTQSPSSLSASVGDRVTITCRASQSISSSLAWYQQKPGKAPKLLIYDASSLQSGVPSRFSGSGSGTDFTLTISSLQPEDFATYYCQQSYNTPPTFGGGTKLEIKTTTPAPRPPTPAPTIASQPLSLRPEACRPAAGGAVHTRGLDFACDIYIWAPLAGTCGVLLLSLVITLYCRRDQRLPPDAHKPPGGGSFRTPIQEEQADAHSTLAKIRVKFSRSADAPAYQQGQNQLYNELNLGRREEYDVLDKRRGRDPEMGGKPRRKNPQEGLYNELQKDKMAEAYSEIGMKGERRRGKGHDGLYQGLSTATKDTYDALHMQALPPRGSGEGRGSLLTCGDVEENPGPMALPVTALLLPLALLLHAARPNWVNVISDLKKIEDLIQSMHIDATLYTESDVHPSCKVTAMKCFLLELQVISLESGDASIHDTVENLIILANNSLSSNGNVTESGCKECEELEEKNIKEFLQSFVHIVQMFINTSTTTPAPRPPTPAPTIASQPLSLRPEACRPAAGGAVHTRGLDFACDIYIWAPLAGTCGVLLLSLVITLYC

SEQ ID NO: 438 - protein, 724 aa, Artificial Sequence
  Synthetic
  MISC_FEATURE: NK77.60_CD70_DB04_A05
MALPVTALLLPLALLLHAARPDYKDDDDKGGGGSGGGGSQVQLVQSGAEVKKPGASVKVSCKASGYTFTTYYMHWVRQAPGQGLEWMGIINPTGGSTYYAQKFQGRVTMTRDTSTSTVYMELSSLRSEDTAVYYCARDSGNYQGIFDYWGQGTLVTVSSGGGGSGGGGSGGGGSDIQMTQSPSSLSASVGDRVTITCRASQGIGGYLAWYQQKPGKAPKLLIYDASNLETGVPSRFSGSGSGTDFTLTISSLQPEDFATYYCQQSYDSPPTFGQGTRLEIKTTTPAPRPPTPAPTIASQPLSLRPEACRPAAGGAVHTRGLDFACDIYIWAPLAGTCGVLLLSLVITLYCRRDQRLPPDAHKPPGGGSFRTPIQEEQADAHSTLAKIRVKFSRSADAPAYQQGQNQLYNELNLGRREEYDVLDKRRGRDPEMGGKPRRKNPQEGLYNELQKDKMAEAYSEIGMKGERRRGKGHDGLYQGLSTATKDTYDALHMQALPPRGSGEGRGSLLTCGDVEENPGPMALPVTALLLPLALLLHAARPNWVNVISDLKKIEDLIQSMHIDATLYTESDVHPSCKVTAMKCFLLELQVISLESGDASIHDTVENLIILANNSLSSNGNVTESGCKECEELEEKNIKEFLQSFVHIVQMFINTSTTTPAPRPPTPAPTIASQPLSLRPEACRPAAGGAVHTRGLDFACDIYIWAPLAGTCGVLLLSLVITLYC

SEQ ID NO: 439 - protein, 723 aa, Artificial Sequence
  Synthetic
  MISC_FEATURE: NK77.61_CD70_DB04_A07
MALPVTALLLPLALLLHAARPDYKDDDDKGGGGSGGGGSQVQLVQSGAEVKKPGASVKVSCKASGNTFTSYYMHWVRQAPGQGLEWMGWINPNSGDTNYAQNFQGRVTMTRDTSTSTVYMELSSLRSEDTAVYYCARGVSGYDLFDYWGQGTLVTVSSGGGGSGGGGSGGGGSDIQMTQSPSSLSASVGDRVTITCRASQSVSSYLNWYQQKPGKAPKLLIYDTSNLETGVPSRFSGSGSGTDFTLTISSLQPEDFATYYCQQAHSFPLTFGGGTKVEIKTTTPAPRPPTPAPTIASQPLSLRPEACRPAAGGAVHTRGLDFACDIYIWAPLAGTCGVLLLSLVITLYCRRDQRLPPDAHKPPGGGSFRTPIQEEQADAHSTLAKIRVKFSRSADAPAYQQGQNQLYNELNLGRREEYDVLDKRRGRDPEMGGKPRRKNPQEGLYNELQKDKMAEAYSEIGMKGERRRGKGHDGLYQGLSTATKDTYDALHMQALPPRGSGEGRGSLLTCGDVEENPGPMALPVTALLLPLALLLHAARPNWVNVISDLKKIEDLIQSMHIDATLYTESDVHPSCKVTAMKCFLLELQVISLESGDASIHDTVENLIILANNSLSSNGNVTESGCKECEELEEKNIKEFLQSFVHIVQMFINTSTTTPAPRPPTPAPTIASQPLSLRPEACRPAAGGAVHTRGLDFACDIYIWAPLAGTCGVLLLSLVITLYC

SEQ ID NO: 440 - protein, 723 aa, Artificial Sequence
  Synthetic
  MISC_FEATURE: NK77.62_CD70_DB04_A10
MALPVTALLLPLALLLHAARPDYKDDDDKGGGGSGGGGSEVQLVESGGGLVKPGGSLRLSCAASGFTFSSYGMHWVRQAPGKGLEWVASIKHDGSEQYYVDSVKGRFTISRDDSKNTLYLQMNSLKTEDTAVYYCAASGVDVWGQGTTVTVSSGGGGSGGGGSGGGGSDIVMTQSPLSLPVTPGEPASISCRSSQSLLHSNGYNYLDWYLQKPGQSPQLLIYLGSTRASGVPDRFSGSGSGTDFTLKISRVEAEDVGVYYCMQALDTPLTFGGGTKLEIKTTTPAPRPPTPAPTIASQPLSLRPEACRPAAGGAVHTRGLDFACDIYIWAPLAGTCGVLLLSLVITLYCRRDQRLPPDAHKPPGGGSFRTPIQEEQADAHSTLAKIRVKFSRSADAPAYQQGQNQLYNELNLGRREEYDVLDKRRGRDPEMGGKPRRKNPQEGLYNELQKDKMAEAYSEIGMKGERRRGKGHDGLYQGLSTATKDTYDALHMQALPPRGSGEGRGSLLTCGDVEENPGPMALPVTALLLPLALLLHAARPNWVNVISDLKKIEDLIQSMHIDATLYTESDVHPSCKVTAMKCFLLELQVISLESGDASIHDTVENLIILANNSLSSNGNVTESGCKECEELEEKNIKEFLQSFVHIVQMFINTSTTTPAPRPPTPAPTIASQPLSLRPEACRPAAGGAVHTRGLDFACDIYIWAPLAGTCGVLLLSLVITLYC

SEQ ID NO: 441 - protein, 726 aa, Artificial Sequence
  Synthetic
  MISC_FEATURE: NK77.63_CD70_DB04_A11
MALPVTALLLPLALLLHAARPDYKDDDDKGGGGSGGGGSQVQLVQSGAEVKKPGASVKVSCKASGGTFSRYDINWVRQAPGQGLEWVGIIDPTGASTSYAQKFQGRVTMTRDTSTSTVYMELSSLRSEDTAVYYCARDYSYGMDYYGMDVWGQGTLVTVSSGGGGSGGGGSGGGGSDIQMTQSPSSLSASVGDRVTITCQASQDISNYLNWYQQKPGKAPKLLIYDTSNLQTGVPSRFSGSGSGTDFTLTISSLQPEDFATYYLSTDLQTTAHFGQGTKVEIKTTTPAPRPPTPAPTIASQPLSLRPEACRPAAGGAVHTRGLDFACDIYIWAPLAGTCGVLLLSLVITLYCRRDQRLPPDAHKPPGGGSFRTPIQEEQADAHSTLAKIRVKFSRSADAPAYQQGQNQLYNELNLGRREEYDVLDKRRGRDPEMGGKPRRKNPQEGLYNELQKDKMAEAYSEIGMKGERRRGKGHDGLYQGLSTATKDTYDALHMQALPPRGSGEGRGSLLTCGDVEENPGPMALPVTALLLPLALLLHAARPNWVNVISDLKKIEDLIQSMHIDATLYTESDVHPSCKVTAMKCFLLELQVISLESGDASIHDTVENLIILANNSLSSNGNVTESGCKECEELEEKNIKEFLQSFVHIVQMFINTSTTTPAPRPPTPAPTIASQPLSLRPEACRPAAGGAVHTRGLDFACDIYIWAPLAGTCGVLLLSLVITLYC

SEQ ID NO: 442 - protein, 728 aa, Artificial Sequence
  Synthetic
  MISC_FEATURE: NK77.64_CD70_DB04_B03
MALPVTALLLPLALLLHAARPDYKDDDDKGGGGSGGGGSQVQLVQSGAEVKKPGSSVKVSCKASGYTFTSYGISWVRQAPGQGLEWMGGIIPIFGTTNYAQKFQGRVTITADESTSTAYMELSSLRSEDTAVYYCARDHSGDGYFDLWGRGTLVTVSSGGGGSGGGGSGGGGSDIVMTQSPLSLPVTPGEPASISCRSSQSLLHSNGYNYLDWYLQKPGQSPQLLIYDASSLQSGVPDRFSGSGSGTDFTLKISRVEAEDVGVYYCMQGTHWPPTFGQGTKVEIKTTTPAPRPPTPAPTIASQPLSLRPEACRPAAGGAVHTRGLDFACDIYIWAPLAGTCGVLLLSLVITLYCRRDQRLPPDAHKPPGGGSFRTPIQEEQADAHSTLAKIRVKFSRSADAPAYQQGQNQLYNELNLGRREEYDVLDKRRGRDPEMGGKPRRKNPQEGLYNELQKDKMAEAYSEIGMKGERRRGKGHDGLYQGLSTATKDTYDALHMQALPPRGSGEGRGSLLTCGDVEENPGPMALPVTALLLPLALLLHAARPNWVNVISDLKKIEDLIQSMHIDATLYTESDVHPSCKVTAMKCFLLELQVISLESGDASIHDTVENLIILANNSLSSNGNVTESGCKECEELEEKNIKEFLQSFVHIVQMFINTSTTTPAPRPPTPAPTIASQPLSLRPEACRPAAGGAVHTRGLDFACDIYIWAPLAGTCGVLLLSLVITLYC

SEQ ID NO: 443 - protein, 722 aa, Artificial Sequence
  Synthetic
  MISC_FEATURE: NK77.65_CD70_DB04_B05
MALPVTALLLPLALLLHAARPDYKDDDDKGGGGSGGGGSQVQLVQSGAEVKKPGASVKVSCKASGYTFTENEMHWVRQAPGQGLEWMGWINPNSGGTNYAQKFQGRVTMTRDTSTSTVYMELSSLRSEDTAVYYCAGSWGGYYFDYWGQGTLVTVSSGGGGSGGGGSGGGGSDIQMTQSPSSLSASVGDRVTITCRASQSVSRYLNWYQQKPGKAPKLLIYDASNLETGVPSRFSGSGSGTDFTLTISSLQPEDFATYYCQQADSFPVTFGQGTKLEIKTTTPAPRPPTPAPTIASQPLSLRPEACRPAAGGAVHTRGLDFACDIYIWAPLAGTCGVLLLSLVITLYCRRDQRLPPDAHKPPGGGSFRTPIQEEQADAHSTLAKIRVKFSRSADAPAYQQGQNQLYNELNLGRREEYDVLDKRRGRDPEMGGKPRRKNPQEGLYNELQKDKMAEAYSEIGMKGERRRGKGHDGLYQGLSTATKDTYDALHMQALPPRGSGEGRGSLLTCGDVEENPGPMALPVTALLLPLALLLHAARPNWVNVISDLKKIEDLIQSMHIDATLYTESDVHPSCKVTAMKCFLLELQVISLESGDASIHDTVENLIILANNSLSSNGNVTESGCKECEELEEKNIKEFLQSFVHIVQMFINTSTTTPAPRPPTPAPTIASQPLSLRPEACRPAAGGAVHTRGLDFACDIYIWAPLAGTCGVLLLSLVITLYC

SEQ ID NO: 444 - protein, 725 aa, Artificial Sequence
  Synthetic
  MISC_FEATURE: NK77.66_CD70_DB04_B07
MALPVTALLLPLALLLHAARPDYKDDDDKGGGGSGGGGSQVQLVQSGAEVKKPGASVKVSCKASGYTFTNYYIYWVRQAPGQGLEWMGWINPNDGATNYAQKFQGRVTMTRDTSTSTVYMELSSLRSEDTAVYYCAREGNDYYYYFMDYWGQGTLVTVSSGGGGSGGGGSGGGGSDIQMTQSPSSLSASVGDRVTITCRASQGISNNLNWYQQKPGKAPKLLIYHASNLETGVPSRFSGSGSGTDFTLTISSLQPEDFATYYCQQSYDGPMTFGQGTKLEIKTTTPAPRPPTPAPTIASQPLSLRPEACRPAAGGAVHTRGLDFACDIYIWAPLAGTCGVLLLSLVITLYCRRDQRLPPDAHKPPGGGSFRTPIQEEQADAHSTLAKIRVKFSRSADAPAYQQGQNQLYNELNLGRREEYDVLDKRRGRDPEMGGKPRRKNPQEGLYNELQKDKMAEAYSEIGMKGERRRGKGHDGLYQGLSTATKDTYDALHMQALPPRGSGEGRGSLLTCGDVEENPGPMALPVTALLLPLALLLHAARPNWVNVISDLKKIEDLIQSMHIDATLYTESDVHPSCKVTAMKCFLLELQVISLESGDASIHDTVENLIILANNSLSSNGNVTESGCKECEELEEKNIKEFLQSFVHIVQMFINTSTTTPAPRPPTPAPTIASQPLSLRPEACRPAAGGAVHTRGLDFACDIYIWAPLAGTCGVLLLSLVITLYC

SEQ ID NO: 445 - protein, 731 aa, Artificial Sequence
  Synthetic
  MISC_FEATURE: NK77.67_CD70_DB04_C01
MALPVTALLLPLALLLHAARPDYKDDDDKGGGGSGGGGSQVQLVQSGAEVKKPGSSVKVSCKASGGTFSSYAISWVRQAPGQGLEWMGGITPMFGTTDYAQKFQGRVTITADESTSTAYMELSSLRSEDTAVYYCARDERDGYATVAFDIWGQGTMVTVSSGGGGSGGGGSGGGGSDIVMTQSPLSLPVTPGEPASISCRSSQSLLHSNGYNYLDWYLQKPGQSPQLLIYDASNLETGVPDRFSGSGSGTDFTLKISRVEAEDVGVYYCMQGTHWPPTFGQGTKVEIKTTTPAPRPPTPAPTIASQPLSLRPEACRPAAGGAVHTRGLDFACDIYIWAPLAGTCGVLLLSLVITLYCRRDQRLPPDAHKPPGGGSFRTPIQEEQADAHSTLAKIRVKFSRSADAPAYQQGQNQLYNELNLGRREEYDVLDKRRGRDPEMGGKPRRKNPQEGLYNELQKDKMAEAYSEIGMKGERRRGKGHDGLYQGLSTATKDTYDALHMQALPPRGSGEGRGSLLTCGDVEENPGPMALPVTALLLPLALLLHAARPNWVNVISDLKKIEDLIQSMHIDATLYTESDVHPSCKVTAMKCFLLELQVISLESGDASIHDTVENLIILANNSLSSNGNVTESGCKECEELEEKNIKEFLQSFVHIVQMFINTSTTTPAPRPPTPAPTIASQPLSLRPEACRPAAGGAVHTRGLDFACDIYIWAPLAGTCGVLLLSLVITLYC

SEQ ID NO: 446 - protein, 726 aa, Artificial Sequence
  Synthetic
  MISC_FEATURE: NK77.68_CD70_DB04_C04
MALPVTALLLPLALLLHAARPDYKDDDDKGGGGSGGGGSQVQLVQSGAEVKKPGASVKVSCKASGYTFTSYYMHWVRQAPGQGLEWMGIINPSDGGTSYADKFQGRVTMTRDTSTSTVYMELSSLRSEDTAVYYCARALAPLGWGDGMDVWGQGTTVTVSSGGGGSGGGGSGGGGSDIQMTQSPSSLSASVGDRVTITCQASQDISNYLNWYQQKPGKAPKLLIYDASNLETGVPSRFSGSGSGTDFTLTISSLQPEDFATYYCQQSYDGPITFGQGTRLEIKTTTPAPRPPTPAPTIASQPLSLRPEACRPAAGGAVHTRGLDFACDIYIWAPLAGTCGVLLLSLVITLYCRRDQRLPPDAHKPPGGGSFRTPIQEEQADAHSTLAKIRVKFSRSADAPAYQQGQNQLYNELNLGRREEYDVLDKRRGRDPEMGGKPRRKNPQEGLYNELQKDKMAEAYSEIGMKGERRRGKGHDGLYQGLSTATKDTYDALHMQALPPRGSGEGRGSLLTCGDVEENPGPMALPVTALLLPLALLLHAARPNWVNVISDLKKIEDLIQSMHIDATLYTESDVHPSCKVTAMKCFLLELQVISLESGDASIHDTVENLIILANNSLSSNGNVTESGCKECEELEEKNIKEFLQSFVHIVQMFINTSTTTPAPRPPTPAPTIASQPLSLRPEACRPAAGGAVHTRGLDFACDIYIWAPLAGTCGVLLLSLVITLYC

SEQ ID NO: 447 - protein, 723 aa, Artificial Sequence
  Synthetic
  MISC_FEATURE: NK77.69_CD70_DB04_C06
MALPVTALLLPLALLLHAARPDYKDDDDKGGGGSGGGGSQVQLVQSGAEVKKPGSSVKVSCKASGYTFTSYYIHWVRQAPGQGLEWMGWMNPSSGVTNFAQKFQGRVTITADESTSTAYMELSSLRSEDTAVYYCARGSDQGDWSDPWGQGTLVTVSSGGGGSGGGGSGGGGSDIQMTQSPSSLSASVGDRVTITCRASQSISSYLNWYQQKPGKAPKLLIYDASNLETGVPSRFSGSGSGTDFTLTISSLQPEDFATYYCQQSYNTPPTFGGGTKVEIKTTTPAPRPPTPAPTIASQPLSLRPEACRPAAGGAVHTRGLDFACDIYIWAPLAGTCGVLLLSLVITLYCRRDQRLPPDAHKPPGGGSFRTPIQEEQADAHSTLAKIRVKFSRSADAPAYQQGQNQLYNELNLGRREEYDVLDKRRGRDPEMGGKPRRKNPQEGLYNELQKDKMAEAYSEIGMKGERRRGKGHDGLYQGLSTATKDTYDALHMQALPPRGSGEGRGSLLTCGDVEENPGPMALPVTALLLPLALLLHAARPNWVNVISDLKKIEDLIQSMHIDATLYTESDVHPSCKVTAMKCFLLELQVISLESGDASIHDTVENLIILANNSLSSNGNVTESGCKECEELEEKNIKEFLQSFVHIVQMFINTSTTTPAPRPPTPAPTIASQPLSLRPEACRPAAGGAVHTRGLDFACDIYIWAPLAGTCGVLLLSLVITLYC

SEQ ID NO: 448 - protein, 726 aa, Artificial Sequence
  Synthetic
  MISC_FEATURE: NK77.70_CD70_DB04_C07
MALPVTALLLPLALLLHAARPDYKDDDDKGGGGSGGGGSQVQLVQSGAEVKKPGASVKVSCKASGYTFTDSYIHWVRQAPGQGLEWIGWMNPNTGDTGYAQKFQGRVTMTRDTSTSTVYMELSSLRSEDTAVYYCAKDDFGELAPATFDPWGQGTLVTVSSGGGGSGGGGSGGGGSDIQMTQSPSSLSASVGDRVTITCQASQDISNYLNWYQQKPGKAPKLLIYGASSLQSGVPSRFSGSGSGTDFTLTISSLQPEDFATYYCLQDAATPITFGQGTRLEIKTTTPAPRPPTPAPTIASQPLSLRPEACRPAAGGAVHTRGLDFACDIYIWAPLAGTCGVLLLSLVITLYCRRDQRLPPDAHKPPGGGSFRTPIQEEQADAHSTLAKIRVKFSRSADAPAYQQGQNQLYNELNLGRREEYDVLDKRRGRDPEMGGKPRRKNPQEGLYNELQKDKMAEAYSEIGMKGERRRGKGHDGLYQGLSTATKDTYDALHMQALPPRGSGEGRGSLLTCGDVEENPGPMALPVTALLLPLALLLHAARPNWVNVISDLKKIEDLIQSMHIDATLYTESDVHPSCKVTAMKCFLLELQVISLESGDASIHDTVENLIILANNSLSSNGNVTESGCKECEELEEKNIKEFLQSFVHIVQMFINTSTTTPAPRPPTPAPTIASQPLSLRPEACRPAAGGAVHTRGLDFACDIYIWAPLAGTCGVLLLSLVITLYC

SEQ ID NO: 449 - protein, 726 aa, Artificial Sequence
  Synthetic
  MISC_FEATURE: NK77.71_CD70_DB04_D02
MALPVTALLLPLALLLHAARPDYKDDDDKGGGGSGGGGSQVQLVQSGAEVKKPGASVKVSCKASGYTFTSYDINWVRQAPGQGLEWMGVISPSGGGTSYAQKFQGRVTMTRDTSTSTVYMELSSLRSEDTAVYYCARYYGGNPEGWYFDLWGRGTLVTVSSGGGGSGGGGSGGGGSDIQMTQSPSSLSASVGDRVTITCRASQSIGNWLAWYQQKPGKAPKLLIYDASDLETGVPSRFSGSGSGTDFTLTISSLQPEDFATYYCQQSYTTPWTFGQGTKVEIKTTTPAPRPPTPAPTIASQPLSLRPEACRPAAGGAVHTRGLDFACDIYIWAPLAGTCGVLLLSLVITLYCRRDQRLPPDAHKPPGGGSFRTPIQEEQADAHSTLAKIRVKFSRSADAPAYQQGQNQLYNELNLGRREEYDVLDKRRGRDPEMGGKPRRKNPQEGLYNELQKDKMAEAYSEIGMKGERRRGKGHDGLYQGLSTATKDTYDALHMQALPPRGSGEGRGSLLTCGDVEENPGPMALPVTALLLPLALLLHAARPNWVNVISDLKKIEDLIQSMHIDATLYTESDVHPSCKVTAMKCFLLELQVISLESGDASIHDTVENLIILANNSLSSNGNVTESGCKECEELEEKNIKEFLQSFVHIVQMFINTSTTTPAPRPPTPAPTIASQPLSLRPEACRPAAGGAVHTRGLDFACDIYIWAPLAGTCGVLLLSLVITLYC

SEQ ID NO: 450 - protein, 741 aa, Artificial Sequence
  Synthetic
  MISC_FEATURE: NK77.72_CD70_DB04_D05
MALPVTALLLPLALLLHAARPDYKDDDDKGGGGSGGGGSEVQLLESGGGLVQPGGSLRLSCAASGFVFDDYAIHWVRQAPGKGLEWVAAISYDGSNKYYADSVKGRFTISRDNSKNTLYLQMNSLRAEDTAVYYCARAPQYYGSGTDPLEVRYYYYGMDVWGQGTTVTVSSGGGGSGGGGSGGGGSDIVMTQSPLSLPVTPGEPASISCRSSQSLLHSNGYNYLDWYLQKPGQSPQLLIYEVSNRASGVPDRFSGSGSGTDFTLKISRVEAEDVGVYYCMKGLQTPLTFGPGTKVDIKTTTPAPRPPTPAPTIASQPLSLRPEACRPAAGGAVHTRGLDFACDIYIWAPLAGTCGVLLLSLVITLYCRRDQRLPPDAHKPPGGGSFRTPIQEEQADAHSTLAKIRVKFSRSADAPAYQQGQNQLYNELNLGRREEYDVLDKRRGRDPEMGGKPRRKNPQEGLYNELQKDKMAEAYSEIGMKGERRRGKGHDGLYQGLSTATKDTYDALHMQALPPRGSGEGRGSLLTCGDVEENPGPMALPVTALLLPLALLLHAARPNWVNVISDLKKIEDLIQSMHIDATLYTESDVHPSCKVTAMKCFLLELQVISLESGDASIHDTVENLIILANNSLSSNGNVTESGCKECEELEEKNIKEFLQSFVHIVQMFINTSTTTPAPRPPTPAPTIASQPLSLRPEACRPAAGGAVHTRGLDFACDIYIWAPLAGTCGVLLLSLVITLYC

SEQ ID NO: 451 - protein, 726 aa, Artificial Sequence
  Synthetic
  MISC_FEATURE: NK77.73_CD70_DB04_D07
MALPVTALLLPLALLLHAARPDYKDDDDKGGGGSGGGGSQVQLVQSGAEVKKPGSSVKVSCKASGGTFRNYAISWVRQAPGQGLEWMGGIIPIFGTANYAQKFQGRVTITADESTSTAYMELSSLRSEDTAVYYCARDHSAGTHHDAFDIWGQGTMVTVSSGGGGSGGGGSGGGGSDIQMTQSPSSLSASVGDRVTITCRASQGISNYLAWYQQKPGKAPKLLIYAASSLQSGVPSRFSGSGSGTDFTLTISSLQPEDFATYYCQQSHSTPLTFGQGTKVEIKTTTPAPRPPTPAPTIASQPLSLRPEACRPAAGGAVHTRGLDFACDIYIWAPLAGTCGVLLLSLVITLYCRRDQRLPPDAHKPPGGGSFRTPIQEEQADAHSTLAKIRVKFSRSADAPAYQQGQNQLYNELNLGRREEYDVLDKRRGRDPEMGGKPRRKNPQEGLYNELQKDKMAEAYSEIGMKGERRRGKGHDGLYQGLSTATKDTYDALHMQALPPRGSGEGRGSLLTCGDVEENPGPMALPVTALLLPLALLLHAARPNWVNVISDLKKIEDLIQSMHIDATLYTESDVHPSCKVTAMKCFLLELQVISLESGDASIHDTVENLIILANNSLSSNGNVTESGCKECEELEEKNIKEFLQSFVHIVQMFINTSTTTPAPRPPTPAPTIASQPLSLRPEACRPAAGGAVHTRGLDFACDIYIWAPLAGTCGVLLLSLVITLYC

SEQ ID NO: 452 - protein, 721 aa, Artificial Sequence
  Synthetic
  MISC_FEATURE: NK77.74_CD70_DB04_D08
MALPVTALLLPLALLLHAARPDYKDDDDKGGGGSGGGGSQVQLVQSGAEVKKPGASVKVSCKASGYTFTSYYIHWVRQAPGQGLEWMGWMNPNSGNAGYAQKFQGRVTMTRDTSTSTVYMELSSLRSEDTAVYYCAREYWGSFDYWGQGTLVTVSSGGGGSGGGGSGGGGSDIQMTQSPSSLSASVGDRVTITCRASQGISNNLNWYQQKPGKAPKLLIYDASNLETGVPSRFSGSGSGTDFTLTISSLQPEDFATYYCQQSYSTPYTFGQGTKVEIKTTTPAPRPPTPAPTIASQPLSLRPEACRPAAGGAVHTRGLDFACDIYIWAPLAGTCGVLLLSLVITLYCRRDQRLPPDAHKPPGGGSFRTPIQEEQADAHSTLAKIRVKFSRSADAPAYQQGQNQLYNELNLGRREEYDVLDKRRGRDPEMGGKPRRKNPQEGLYNELQKDKMAEAYSEIGMKGERRRGKGHDGLYQGLSTATKDTYDALHMQALPPRGSGEGRGSLLTCGDVEENPGPMALPVTALLLPLALLLHAARPNWVNVISDLKKIEDLIQSMHIDATLYTESDVHPSCKVTAMKCFLLELQVISLESGDASIHDTVENLIILANNSLSSNGNVTESGCKECEELEEKNIKEFLQSFVHIVQMFINTSTTTPAPRPPTPAPTIASQPLSLRPEACRPAAGGAVHTRGLDFACDIYIWAPLAGTCGVLLLSLVITLYC

SEQ ID NO: 453 - protein, 722 aa, Artificial Sequence
  Synthetic
  MISC_FEATURE: NK77.75_CD70_DB04_D10
MALPVTALLLPLALLLHAARPDYKDDDDKGGGGSGGGGSQVQLVQSGAEVKKPGASVKVSCKASGYTFTGYYMHWVRQAPGQGLEWMGMIDPSDGSTIYAQKFQGRVTMTRDTSTSTVYMELSSLRSEDTAVYYCARERPLYASDLWGQGTLVTVSSGGGGSGGGGSGGGGSDIQMTQSPSSLSASVGDRVTITCRASQDIGNDLGWYQQKPGKAPKLLIYAASSLQSGVPSRFSGSGSGTDFTLTISSLQPEDFATYYCLQDYDYPLTFGQGTKVEIKTTTPAPRPPTPAPTIASQPLSLRPEACRPAAGGAVHTRGLDFACDIYIWAPLAGTCGVLLLSLVITLYCRRDQRLPPDAHKPPGGGSFRTPIQEEQADAHSTLAKIRVKFSRSADAPAYQQGQNQLYNELNLGRREEYDVLDKRRGRDPEMGGKPRRKNPQEGLYNELQKDKMAEAYSEIGMKGERRRGKGHDGLYQGLSTATKDTYDALHMQALPPRGSGEGRGSLLTCGDVEENPGPMALPVTALLLPLALLLHAARPNWVNVISDLKKIEDLIQSMHIDATLYTESDVHPSCKVTAMKCFLLELQVISLESGDASIHDTVENLIILANNSLSSNGNVTESGCKECEELEEKNIKEFLQSFVHIVQMFINTSTTTPAPRPPTPAPTIASQPLSLRPEACRPAAGGAVHTRGLDFACDIYIWAPLAGTCGVLLLSLVITLYC

SEQ ID NO: 454 - protein, 723 aa, Artificial Sequence
  Synthetic
  MISC_FEATURE: NK77.85_CD70_DB03_B02
MALPVTALLLPLALLLHAARPDYKDDDDKGGGGSGGGGSQVQLVQSGAEVKKPGSSVKVSCKASGYTFTNYYMHWVRQAPGQGLEWMGWMNPDSGNTGYAQKFQGRVTITADESTSTAYMELSSLRSEDTAVYYCARSSSSWPDFDLWGRGTLVTVSSGGGGSGGGGSGGGGSDIQMTQSPSSLSASVGDRVTITCRASQSISSYLNWYQQKPGKAPKLLIYDASNLETGVPSRFSGSGSGTDFTLTISSLQPEDFATYYCQQSYNTPYSFGQGTKVEIKTTTPAPRPPTPAPTIASQPLSLRPEACRPAAGGAVHTRGLDFACDIYIWAPLAGTCGVLLLSLVITLYCRRDQRLPPDAHKPPGGGSFRTPIQEEQADAHSTLAKIRVKFSRSADAPAYQQGQNQLYNELNLGRREEYDVLDKRRGRDPEMGGKPRRKNPQEGLYNELQKDKMAEAYSEIGMKGERRRGKGHDGLYQGLSTATKDTYDALHMQALPPRGSGEGRGSLLTCGDVEENPGPMALPVTALLLPLALLLHAARPNWVNVISDLKKIEDLIQSMHIDATLYTESDVHPSCKVTAMKCFLLELQVISLESGDASIHDTVENLIILANNSLSSNGNVTESGCKECEELEEKNIKEFLQSFVHIVQMFINTSTTTPAPRPPTPAPTIASQPLSLRPEACRPAAGGAVHTRGLDFACDIYIWAPLAGTCGVLLLSLVITLYC

SEQ ID NO: 455 - protein, 724 aa, Artificial Sequence
  Synthetic
  MISC_FEATURE: NK77.86_CD70_DB04_A06
MALPVTALLLPLALLLHAARPDYKDDDDKGGGGSGGGGSQVQLVQSGAEVKKPGASVKVSCKASGYTFTSYSMHWVRQAPGQGLEWVGIINPSSGSASYAQKFQGRVTMTRDTSTSTVYMELSSLRSEDTAVYYCARERGAYSSTFDYWGQGTLVTVSSGGGGSGGGGSGGGGSDIQMTQSPSSLSASVGDRVTITCRTSQSISSYLNWYQQKPGKAPKLLIYDASNLETGVPSRFSGSGSGTDFTLTISSLQPEDFATYYCLQDYSYPLTFGQGTKVEIKTTTPAPRPPTPAPTIASQPLSLRPEACRPAAGGAVHTRGLDFACDIYIWAPLAGTCGVLLLSLVITLYCRRDQRLPPDAHKPPGGGSFRTPIQEEQADAHSTLAKIRVKFSRSADAPAYQQGQNQLYNELNLGRREEYDVLDKRRGRDPEMGGKPRRKNPQEGLYNELQKDKMAEAYSEIGMKGERRRGKGHDGLYQGLSTATKDTYDALHMQALPPRGSGEGRGSLLTCGDVEENPGPMALPVTALLLPLALLLHAARPNWVNVISDLKKIEDLIQSMHIDATLYTESDVHPSCKVTAMKCFLLELQVISLESGDASIHDTVENLIILANNSLSSNGNVTESGCKECEELEEKNIKEFLQSFVHIVQMFINTSTTTPAPRPPTPAPTIASQPLSLRPEACRPAAGGAVHTRGLDFACDIYIWAPLAGTCGVLLLSLVITLYC

SEQ ID NO: 456 - protein, 724 aa, Artificial Sequence
  Synthetic
  MISC_FEATURE: NK77.87_CD70_DB04_A09
MALPVTALLLPLALLLHAARPDYKDDDDKGGGGSGGGGSQVQLVQSGAEVKKPGASVKVSCKASGYTFTDYYMHWVRQAPGQGLEWMGVINPSDGTAHYAQRLQGRVTMTRDTSTSTVYMELSSLRSEDTAVYYCARDSGSYYADFDYWGQGTLVTVSSGGGGSGGGGSGGGGSDIQMTQSPSSLSASVGDRVTITCQASQDISNYLNWYQQKPGKAPKLLIYDASSLQSGVPSRFSGSGSGTDFTLTISSLQPEDFATYYCQQSYSTPPAFGQGTKVEIKTTTPAPRPPTPAPTIASQPLSLRPEACRPAAGGAVHTRGLDFACDIYIWAPLAGTCGVLLLSLVITLYCRRDQRLPPDAHKPPGGGSFRTPIQEEQADAHSTLAKIRVKFSRSADAPAYQQGQNQLYNELNLGRREEYDVLDKRRGRDPEMGGKPRRKNPQEGLYNELQKDKMAEAYSEIGMKGERRRGKGHDGLYQGLSTATKDTYDALHMQALPPRGSGEGRGSLLTCGDVEENPGPMALPVTALLLPLALLLHAARPNWVNVISDLKKIEDLIQSMHIDATLYTESDVHPSCKVTAMKCFLLELQVISLESGDASIHDTVENLIILANNSLSSNGNVTESGCKECEELEEKNIKEFLQSFVHIVQMFINTSTTTPAPRPPTPAPTIASQPLSLRPEACRPAAGGAVHTRGLDFACDIYIWAPLAGTCGVLLLSLVITLYC

SEQ ID NO: 457 - protein, 989 aa, Artificial Sequence
  Synthetic
  MISC_FEATURE: NK77.76_38-38
MALPVTALLLPLALLLHAARPDYKDDDDKGGGGSGGGGSQVQLVQSGAEVKKPGASVKVSCKASGYSFTSYYMHWVRQAPGQGLEWMGIINPSGGTTSYAQKFQGRVTMTRDTSTSTVYMELSSLRSEDTAVYYCARDNSPYSSSWWDYFDYWGQGTLVTVSSGGGGSGGGGSGGGGSDIQMTQSPSSLSASVGDRVTITCRASQDIRHYLAWYQQKPGKAPKLLIYDASSLQSGVPSRFSGSGSGTDFTLTISSLQPEDFATYYCQQTYDAPITFGQGTRLEIKGGGGSGGGGSGGGGSQVQLVQSGAEVKKPGASVKVSCKASGYSFTSYYMHWVRQAPGQGLEWMGIINPSGGTTSYAQKFQGRVTMTRDTSTSTVYMELSSLRSEDTAVYYCARDNSPYSSSWWDYFDYWGQGTLVTVSSGGGGSGGGGSGGGGSDIQMTQSPSSLSASVGDRVTITCRASQDIRHYLAWYQQKPGKAPKLLIYDASSLQSGVPSRFSGSGSGTDFTLTISSLQPEDFATYYCQQTYDAPITFGQGTRLEIKTTTPAPRPPTPAPTIASQPLSLRPEACRPAAGGAVHTRGLDFACDIYIWAPLAGTCGVLLLSLVITLYCRRDQRLPPDAHKPPGGGSFRTPIQEEQADAHSTLAKIRVKFSRSADAPAYQQGQNQLYNELNLGRREEYDVLDKRRGRDPEMGGKPRRKNPQEGLYNELQKDKMAEAYSEIGMKGERRRGKGHDGLYQGLSTATKDTYDALHMQALPPRGSGEGRGSLLTCGDVEENPGPMALPVTALLLPLALLLHAARPNWVNVISDLKKIEDLIQSMHIDATLYTESDVHPSCKVTAMKCFLLELQVISLESGDASIHDTVENLIILANNSLSSNGNVTESGCKECEELEEKNIKEFLQSFVHIVQMFINTSTTTPAPRPPTPAPTIASQPLSLRPEACRPAAGGAVHTRGLDFACDIYIWAPLAGTCGVLLLSLVITLYC

SEQ ID NO: 458 - protein, 989 aa, Artificial Sequence
  Synthetic
  MISC_FEATURE: NK77.77_64-64
MALPVTALLLPLALLLHAARPDYKDDDDKGGGGSGGGGSQVQLVQSGAEVKKPGSSVKVSCKASGYTFTSYGISWVRQAPGQGLEWMGGIIPIFGTTNYAQKFQGRVTITADESTSTAYMELSSLRSEDTAVYYCARDHSGDGYFDLWGRGTLVTVSSGGGGSGGGGSGGGGSDIVMTQSPLSLPVTPGEPASISCRSSQSLLHSNGYNYLDWYLQKPGQSPQLLIYDASSLQSGVPDRFSGSGSGTDFTLKISRVEAEDVGVYYCMQGTHWPPTFGQGTKVEIKGGGGSGGGGSGGGGSQVQLVQSGAEVKKPGSSVKVSCKASGYTFTSYGISWVRQAPGQGLEWMGGIIPIFGTTNYAQKFQGRVTITADESTSTAYMELSSLRSEDTAVYYCARDHSGDGYFDLWGRGTLVTVSSGGGGSGGGGSGGGGSDIVMTQSPLSLPVTPGEPASISCRSSQSLLHSNGYNYLDWYLQKPGQSPQLLIYDASSLQSGVPDRFSGSGSGTDFTLKISRVEAEDVGVYYCMQGTHWPPTFGQGTKVEIKTTTPAPRPPTPAPTIASQPLSLRPEACRPAAGGAVHTRGLDFACDIYIWAPLAGTCGVLLLSLVITLYCRRDQRLPPDAHKPPGGGSFRTPIQEEQADAHSTLAKIRVKFSRSADAPAYQQGQNQLYNELNLGRREEYDVLDKRRGRDPEMGGKPRRKNPQEGLYNELQKDKMAEAYSEIGMKGERRRGKGHDGLYQGLSTATKDTYDALHMQALPPRGSGEGRGSLLTCGDVEENPGPMALPVTALLLPLALLLHAARPNWVNVISDLKKIEDLIQSMHIDATLYTESDVHPSCKVTAMKCFLLELQVISLESGDASIHDTVENLIILANNSLSSNGNVTESGCKECEELEEKNIKEFLQSFVHIVQMFINTSTTTPAPRPPTPAPTIASQPLSLRPEACRPAAGGAVHTRGLDFACDIYIWAPLAGTCGVLLLSLVITLYC

SEQ ID NO: 459 - protein, 977 aa, Artificial Sequence
  Synthetic
  MISC_FEATURE: NK77.78_65-65
MALPVTALLLPLALLLHAARPDYKDDDDKGGGGSGGGGSQVQLVQSGAEVKKPGASVKVSCKASGYTFTENEMHWVRQAPGQGLEWMGWINPNSGGTNYAQKFQGRVTMTRDTSTSTVYMELSSLRSEDTAVYYCAGSWGGYYFDYWGQGTLVTVSSGGGGSGGGGSGGGGSDIQMTQSPSSLSASVGDRVTITCRASQSVSRYLNWYQQKPGKAPKLLIYDASNLETGVPSRFSGSGSGTDFTLTISSLQPEDFATYYCQQADSFPVTFGQGTKLEIKGGGGSGGGGSGGGGSQVQLVQSGAEVKKPGASVKVSCKASGYTFTENEMHWVRQAPGQGLEWMGWINPNSGGTNYAQKFQGRVTMTRDTSTSTVYMELSSLRSEDTAVYYCAGSWGGYYFDYWGQGTLVTVSSGGGGSGGGGSGGGGSDIQMTQSPSSLSASVGDRVTITCRASQSVSRYLNWYQQKPGKAPKLLIYDASNLETGVPSRFSGSGSGTDFTLTISSLQPEDFATYYCQQADSFPVTFGQGTKLEIKTTTPAPRPPTPAPTIASQPLSLRPEACRPAAGGAVHTRGLDFACDIYIWAPLAGTCGVLLLSLVITLYCRRDQRLPPDAHKPPGGGSFRTPIQEEQADAHSTLAKIRVKFSRSADAPAYQQGQNQLYNELNLGRREEYDVLDKRRGRDPEMGGKPRRKNPQEGLYNELQKDKMAEAYSEIGMKGERRRGKGHDGLYQGLSTATKDTYDALHMQALPPRGSGEGRGSLLTCGDVEENPGPMALPVTALLLPLALLLHAARPNWVNVISDLKKIEDLIQSMHIDATLYTESDVHPSCKVTAMKCFLLELQVISLESGDASIHDTVENLIILANNSLSSNGNVTESGCKECEELEEKNIKEFLQSFVHIVQMFINTSTTTPAPRPPTPAPTIASQPLSLRPEACRPAAGGAVHTRGLDFACDIYIWAPLAGTCGVLLLSLVITLYC

SEQ ID NO: 460 - protein, 992 aa, Artificial Sequence
  Synthetic
  MISC_FEATURE: NK77.79_38-67
MALPVTALLLPLALLLHAARPDYKDDDDKGGGGSGGGGSQVQLVQSGAEVKKPGASVKVSCKASGYSFTSYYMHWVRQAPGQGLEWMGIINPSGGTTSYAQKFQGRVTMTRDTSTSTVYMELSSLRSEDTAVYYCARDNSPYSSSWWDYFDYWGQGTLVTVSSGGGGSGGGGSGGGGSDIQMTQSPSSLSASVGDRVTITCRASQDIRHYLAWYQQKPGKAPKLLIYDASSLQSGVPSRFSGSGSGTDFTLTISSLQPEDFATYYCQQTYDAPITFGQGTRLEIKGGGGSGGGGSGGGGSQVQLVQSGAEVKKPGSSVKVSCKASGGTFSSYAISWVRQAPGQGLEWMGGITPMFGTTDYAQKFQGRVTITADESTSTAYMELSSLRSEDTAVYYCARDERDGYATVAFDIWGQGTMVTVSSGGGGSGGGGSGGGGSDIVMTQSPLSLPVTPGEPASISCRSSQSLLHSNGYNYLDWYLQKPGQSPQLLIYDASNLETGVPDRFSGSGSGTDFTLKISRVEAEDVGVYYCMQGTHWPPTFGQGTKVEIKTTTPAPRPPTPAPTIASQPLSLRPEACRPAAGGAVHTRGLDFACDIYIWAPLAGTCGVLLLSLVITLYCRRDQRLPPDAHKPPGGGSFRTPIQEEQADAHSTLAKIRVKFSRSADAPAYQQGQNQLYNELNLGRREEYDVLDKRRGRDPEMGGKPRRKNPQEGLYNELQKDKMAEAYSEIGMKGERRRGKGHDGLYQGLSTATKDTYDALHMQALPPRGSGEGRGSLLTCGDVEENPGPMALPVTALLLPLALLLHAARPNWVNVISDLKKIEDLIQSMHIDATLYTESDVHPSCKVTAMKCFLLELQVISLESGDASIHDTVENLIILANNSLSSNGNVTESGCKECEELEEKNIKEFLQSFVHIVQMFINTSTTTPAPRPPTPAPTIASQPLSLRPEACRPAAGGAVHTRGLDFACDIYIWAPLAGTCGVLLLSLVITLYC

SEQ ID NO: 461 - protein, 987 aa, Artificial Sequence
  Synthetic
  MISC_FEATURE: NK77.80_38-68
MALPVTALLLPLALLLHAARPDYKDDDDKGGGGSGGGGSQVQLVQSGAEVKKPGASVKVSCKASGYSFTSYYMHWVRQAPGQGLEWMGIINPSGGTTSYAQKFQGRVTMTRDTSTSTVYMELSSLRSEDTAVYYCARDNSPYSSSWWDYFDYWGQGTLVTVSSGGGGSGGGGSGGGGSDIQMTQSPSSLSASVGDRVTITCRASQDIRHYLAWYQQKPGKAPKLLIYDASSLQSGVPSRFSGSGSGTDFTLTISSLQPEDFATYYCQQTYDAPITFGQGTRLEIKGGGGSGGGGSGGGGSQVQLVQSGAEVKKPGASVKVSCKASGYTFTSYYMHWVRQAPGQGLEWMGIINPSDGGTSYADKFQGRVTMTRDTSTSTVYMELSSLRSEDTAVYYCARALAPLGWGDGMDVWGQGTTVTVSSGGGGSGGGGSGGGGSDIQMTQSPSSLSASVGDRVTITCQASQDISNYLNWYQQKPGKAPKLLIYDASNLETGVPSRFSGSGSGTDFTLTISSLQPEDFATYYCQQSYDGPITFGQGTRLEIKTTTPAPRPPTPAPTIASQPLSLRPEACRPAAGGAVHTRGLDFACDIYIWAPLAGTCGVLLLSLVITLYCRRDQRLPPDAHKPPGGGSFRTPIQEEQADAHSTLAKIRVKFSRSADAPAYQQGQNQLYNELNLGRREEYDVLDKRRGRDPEMGGKPRRKNPQEGLYNELQKDKMAEAYSEIGMKGERRRGKGHDGLYQGLSTATKDTYDALHMQALPPRGSGEGRGSLLTCGDVEENPGPMALPVTALLLPLALLLHAARPNWVNVISDLKKIEDLIQSMHIDATLYTESDVHPSCKVTAMKCFLLELQVISLESGDASIHDTVENLIILANNSLSSNGNVTESGCKECEELEEKNIKEFLQSFVHIVQMFINTSTTTPAPRPPTPAPTIASQPLSLRPEACRPAAGGAVHTRGLDFACDIYIWAPLAGTCGVLLLSLVITLYC

SEQ ID NO: 462 - protein, 992 aa, Artificial Sequence
  Synthetic
  MISC_FEATURE: NK77.81_64-67
MALPVTALLLPLALLLHAARPDYKDDDDKGGGGSGGGGSQVQLVQSGAEVKKPGSSVKVSCKASGYTFTSYGISWVRQAPGQGLEWMGGIIPIFGTTNYAQKFQGRVTITADESTSTAYMELSSLRSEDTAVYYCARDHSGDGYFDLWGRGTLVTVSSGGGGSGGGGSGGGGSDIVMTQSPLSLPVTPGEPASISCRSSQSLLHSNGYNYLDWYLQKPGQSPQLLIYDASSLQSGVPDRFSGSGSGTDFTLKISRVEAEDVGVYYCMQGTHWPPTFGQGTKVEIKGGGGSGGGGSGGGGSQVQLVQSGAEVKKPGSSVKVSCKASGGTFSSYAISWVRQAPGQGLEWMGGITPMFGTTDYAQKFQGRVTITADESTSTAYMELSSLRSEDTAVYYCARDERDGYATVAFDIWGQGTMVTVSSGGGGSGGGGSGGGGSDIVMTQSPLSLPVTPGEPASISCRSSQSLLHSNGYNYLDWYLQKPGQSPQLLIYDASNLETGVPDRFSGSGSGTDFTLKISRVEAEDVGVYYCMQGTHWPPTFGQGTKVEIKTTTPAPRPPTPAPTIASQPLSLRPEACRPAAGGAVHTRGLDFACDIYIWAPLAGTCGVLLLSLVITLYCRRDQRLPPDAHKPPGGGSFRTPIQEEQADAHSTLAKIRVKFSRSADAPAYQQGQNQLYNELNLGRREEYDVLDKRRGRDPEMGGKPRRKNPQEGLYNELQKDKMAEAYSEIGMKGERRRGKGHDGLYQGLSTATKDTYDALHMQALPPRGSGEGRGSLLTCGDVEENPGPMALPVTALLLPLALLLHAARPNWVNVISDLKKIEDLIQSMHIDATLYTESDVHPSCKVTAMKCFLLELQVISLESGDASIHDTVENLIILANNSLSSNGNVTESGCKECEELEEKNIKEFLQSFVHIVQMFINTSTTTPAPRPPTPAPTIASQPLSLRPEACRPAAGGAVHTRGLDFACDIYIWAPLAGTCGVLLLSLVITLYC

SEQ ID NO: 463 - protein, 987 aa, Artificial Sequence
  Synthetic
  MISC_FEATURE: NK77.82_64-68
MALPVTALLLPLALLLHAARPDYKDDDDKGGGGSGGGGSQVQLVQSGAEVKKPGSSVKVSCKASGYTFTSYGISWVRQAPGQGLEWMGGIIPIFGTTNYAQKFQGRVTITADESTSTAYMELSSLRSEDTAVYYCARDHSGDGYFDLWGRGTLVTVSSGGGGSGGGGSGGGGSDIVMTQSPLSLPVTPGEPASISCRSSQSLLHSNGYNYLDWYLQKPGQSPQLLIYDASSLQSGVPDRFSGSGSGTDFTLKISRVEAEDVGVYYCMQGTHWPPTFGQGTKVEIKGGGGSGGGGSGGGGSQVQLVQSGAEVKKPGASVKVSCKASGYTFTSYYMHWVRQAPGQGLEWMGIINPSDGGTSYADKFQGRVTMTRDTSTSTVYMELSSLRSEDTAVYYCARALAPLGWGDGMDVWGQGTTVTVSSGGGGSGGGGSGGGGSDIQMTQSPSSLSASVGDRVTITCQASQDISNYLNWYQQKPGKAPKLLIYDASNLETGVPSRFSGSGSGTDFTLTISSLQPEDFATYYCQQSYDGPITFGQGTRLEIKTTTPAPRPPTPAPTIASQPLSLRPEACRPAAGGAVHTRGLDFACDIYIWAPLAGTCGVLLLSLVITLYCRRDQRLPPDAHKPPGGGSFRTPIQEEQADAHSTLAKIRVKFSRSADAPAYQQGQNQLYNELNLGRREEYDVLDKRRGRDPEMGGKPRRKNPQEGLYNELQKDKMAEAYSEIGMKGERRRGKGHDGLYQGLSTATKDTYDALHMQALPPRGSGEGRGSLLTCGDVEENPGPMALPVTALLLPLALLLHAARPNWVNVISDLKKIEDLIQSMHIDATLYTESDVHPSCKVTAMKCFLLELQVISLESGDASIHDTVENLIILANNSLSSNGNVTESGCKECEELEEKNIKEFLQSFVHIVQMFINTSTTTPAPRPPTPAPTIASQPLSLRPEACRPAAGGAVHTRGLDFACDIYIWAPLAGTCGVLLLSLVITLYC

SEQ ID NO: 464 - protein, 986 aa, Artificial Sequence
  Synthetic
  MISC_FEATURE: NK77.83_65-67
MALPVTALLLPLALLLHAARPDYKDDDDKGGGGSGGGGSQVQLVQSGAEVKKPGASVKVSCKASGYTFTENEMHWVRQAPGQGLEWMGWINPNSGGTNYAQKFQGRVTMTRDTSTSTVYMELSSLRSEDTAVYYCAGSWGGYYFDYWGQGTLVTVSSGGGGSGGGGSGGGGSDIQMTQSPSSLSASVGDRVTITCRASQSVSRYLNWYQQKPGKAPKLLIYDASNLETGVPSRFSGSGSGTDFTLTISSLQPEDFATYYCQQADSFPVTFGQGTKLEIKGGGGSGGGGSGGGGSQVQLVQSGAEVKKPGSSVKVSCKASGGTFSSYAISWVRQAPGQGLEWMGGITPMFGTTDYAQKFQGRVTITADESTSTAYMELSSLRSEDTAVYYCARDERDGYATVAFDIWGQGTMVTVSSGGGGSGGGGSGGGGSDIVMTQSPLSLPVTPGEPASISCRSSQSLLHSNGYNYLDWYLQKPGQSPQLLIYDASNLETGVPDRFSGSGSGTDFTLKISRVEAEDVGVYYCMQGTHWPPTFGQGTKVEIKTTTPAPRPPTPAPTIASQPLSLRPEACRPAAGGAVHTRGLDFACDIYIWAPLAGTCGVLLLSLVITLYCRRDQRLPPDAHKPPGGGSFRTPIQEEQADAHSTLAKIRVKFSRSADAPAYQQGQNQLYNELNLGRREEYDVLDKRRGRDPEMGGKPRRKNPQEGLYNELQKDKMAEAYSEIGMKGERRRGKGHDGLYQGLSTATKDTYDALHMQALPPRGSGEGRGSLLTCGDVEENPGPMALPVTALLLPLALLLHAARPNWVNVISDLKKIEDLIQSMHIDATLYTESDVHPSCKVTAMKCFLLELQVISLESGDASIHDTVENLIILANNSLSSNGNVTESGCKECEELEEKNIKEFLQSFVHIVQMFINTSTTTPAPRPPTPAPTIASQPLSLRPEACRPAAGGAVHTRGLDFACDIYIWAPLAGTCGVLLLSLVITLYC

SEQ ID NO: 465 - protein, 981 aa, Artificial Sequence
  Synthetic
  MISC_FEATURE: NK77.84_65-68
MALPVTALLLPLALLLHAARPDYKDDDDKGGGGSGGGGSQVQLVQSGAEVKKPGASVKVSCKASGYTFTENEMHWVRQAPGQGLEWMGWINPNSGGTNYAQKFQGRVTMTRDTSTSTVYMELSSLRSEDTAVYYCAGSWGGYYFDYWGQGTLVTVSSGGGGSGGGGSGGGGSDIQMTQSPSSLSASVGDRVTITCRASQSVSRYLNWYQQKPGKAPKLLIYDASNLETGVPSRFSGSGSGTDFTLTISSLQPEDFATYYCQQADSFPVTFGQGTKLEIKGGGGSGGGGSGGGGSQVQLVQSGAEVKKPGASVKVSCKASGYTFTSYYMHWVRQAPGQGLEWMGIINPSDGGTSYADKFQGRVTMTRDTSTSTVYMELSSLRSEDTAVYYCARALAPLGWGDGMDVWGQGTTVTVSSGGGGSGGGGSGGGGSDIQMTQSPSSLSASVGDRVTITCQASQDISNYLNWYQQKPGKAPKLLIYDASNLETGVPSRFSGSGSGTDFTLTISSLQPEDFATYYCQQSYDGPITFGQGTRLEIKTTTPAPRPPTPAPTIASQPLSLRPEACRPAAGGAVHTRGLDFACDIYIWAPLAGTCGVLLLSLVITLYCRRDQRLPPDAHKPPGGGSFRTPIQEEQADAHSTLAKIRVKFSRSADAPAYQQGQNQLYNELNLGRREEYDVLDKRRGRDPEMGGKPRRKNPQEGLYNELQKDKMAEAYSEIGMKGERRRGKGHDGLYQGLSTATKDTYDALHMQALPPRGSGEGRGSLLTCGDVEENPGPMALPVTALLLPLALLLHAARPNWVNVISDLKKIEDLIQSMHIDATLYTESDVHPSCKVTAMKCFLLELQVISLESGDASIHDTVENLIILANNSLSSNGNVTESGCKECEELEEKNIKEFLQSFVHIVQMFINTSTTTPAPRPPTPAPTIASQPLSLRPEACRPAAGGAVHTRGLDFACDIYIWAPLAGTCGVLLLSLVITLYC

SEQ ID NO: 466 - DNA, 1472 bp, Artificial Sequence
  Synthetic
  misc_feature: anti-CD19 CAR for T cell
atggccttaccagtgaccgccttgctcctgccgctggccttgctgctccacgccgccaggccggatattcagatgacccagagcccgagcagcctgagcgcgagcgtgggcgatcgcgtgaccattacctgccgcgcgagccaggatattagcaaatatctgaactggtatcagcagaaaccgggcggcaccgtgaaactgctgatttatcataccagccgcctgcatagcggcgtgccgagccgctttagcggcagcggcagcggcaccgattttaccctgaccattagcagcctgcagccggaagatattgcgacctatttttgccagcagggcaacaccctgccgtatacctttggcggcggcaccaaactggaaattaccggtggcggtggctcgggcggtggtgggtcgggtggcggcggatctcaggtgcagctgcaggaaagcggcccgggcctggtgaaaccgagccagaccctgagcctgacctgcaccgtgagcggcgtgagcctgccggattatggcgtgagctggattcgccagccgccgggcaaaggcctggaatggattggcgtgatttggggcagcgaaaccacctattataacagcgcgctgaaaagccgcctgaccattagcaaagataacagcaaaaaccaggtgagcctgaaactgagcagcgtgaccgcggcggataccgcggtgtattattgcgcgaaacattattattatggcggcagctatgcgatggattattggggccagggcaccagcgtgaccgtgagcagcaccacgacgccagcgccgcgaccaccaacaccggcgcccaccatcgcgtcgcagcccctgtccctgcgcccagaggcgtgccggccagcggcggggggcgcagtgcacacgagggggctggacttcgcctgtgatatctacatctgggcgcccttggccgggacttgtggggtccttctcctgtcactggttatcaccctttactgcgcttttccgtcgttaagcgggggagaaaaaagctgctgtacattttcaaacagccgtttatgaggccggtccaaacgactcaggaagaagacggctgctcctgccgctttcctgaggaggaggagggcgggtgcgaactgagagtgaagttcagcaggagcgcagacgcccccgcgtaccagcagggccagaaccagctctataacgagctcaatctaggacgaagagaggagtacgatgttttggacaagagacgtggccgggaccctgagatggggggaaagccgagaaggaagaaccctcaggaaggcctgtacaatgaactgcagaaagataagatggcggaggcctacagtgagattgggatgaaaggcgagcgccggaggggcaaggggcacgatggcctttaccagggtctcagtacagccaccaaggacacctacgacgcccttcacatgcaggccctgccccctcgc

SEQ ID NO: 467 - protein, 9 aa, Artificial Sequence
  Synthetic
  MISC_FEATURE: FP5-13 WT
GALFLGFLG

SEQ ID NO: 468 - protein, 9 aa, Artificial Sequence
  Synthetic
  MISC_FEATURE: FP5-13 A1G2
AGLFLGFLG

SEQ ID NO: 469 - protein, 9 aa, Artificial Sequence
  Synthetic
  MISC_FEATURE: FP5-13 L2A3
GLAFLGFLG

SEQ ID NO: 470 - protein, 9 aa, Artificial Sequence
  Synthetic
  MISC_FEATURE: FP5-13 Scrambled
AGFGLLGLF

SEQ ID NO: 471 - protein, 9 aa, Artificial Sequence
  Synthetic
  MISC_FEATURE: FP5-13 Rescued L7G8
AGFGLLLGF

SEQ ID NO: 472 - protein, 9 aa, Artificial Sequence
  Synthetic
  MISC_FEATURE: TCR alpha TMD
GLRILLLKV

SEQ ID NO: 473 - protein, 5 aa, Artificial Sequence
  Synthetic
  MISC_FEATURE: Consensus domain 1
  MISC_FEATURE (2)..(2): X is any amino acid
  MISC_FEATURE (3)..(3): X is any amino acid
  MISC_FEATURE (4)..(4): X is any amino acid
GXXXG

SEQ ID NO: 474 - protein, 5 aa, Artificial Sequence
  Synthetic
  MISC_FEATURE: consensus domain 2
  MISC_FEATURE (2)..(2): X is any amino acid
  MISC_FEATURE (3)..(3): X is any amino acid
  MISC_FEATURE (4)..(4): X is any amino acid
AXXXG

SEQ ID NO: 475 - DNA, 1797 bp, Artificial Sequence
  Synthetic
atggccttaccagtgaccgccttgctcctgccgctggccttgctgctccacgccgccaggccgttattcaaccaagaagttcaaattcccttgaccgaaagttactgtggcccatgtcctaaaaactggatatgttacaaaaataactgctaccaattttttgatgagagtaaaaactggtatgagagccaggcttcttgtatgtctcaaaatgccagccttctgaaagtatacagcaaagaggaccaggatttacttaaactggtgaagtcatatcattggatgggactagtacacattccaacaaatggatcttggcagtgggaagatggctccattctctcacccaacctactaacaataattgaaatgcagaagggagactgtgcactctatgcctcgagctttaaaggctatatagaaaactgttcaactccaaatacgtacatctgcatgcaaaggactgtgaccacgacgccagcgccgcgaccaccaacaccggcgcccaccatcgcgtcgcagcccctgtccctgcgcccagaggcgtgccggccagcggcggggggcgcagtgcacacgagggggctggacttcgcctgtgatatctacatctgggcgcccttggccgggacttgtggggtccttctcctgtcactggttatcaccctttactgccggagggaccagaggctgccccccgatgcccacaagccccctgggggaggcagtttccggacccccatccaagaggagcaggccgacgcccactccaccctggccaagatcagagtgaagttcagcaggagcgcagacgcccccgcgtaccagcagggccagaaccagctctataacgagctcaatctaggacgaagagaggagtacgatgttttggacaagagacgtggccgggaccctgagatggggggaaagccgagaaggaagaaccctcaggaaggcctgtacaatgaactgcagaaagataagatggcggaggcctacagtgagattgggatgaaaggcgagcgccggaggggcaaggggcacgatggcctttaccagggtctcagtacagccaccaaggacacctacgacgcccttcacatgcaggccctgccccctcgcggctctggcgagggaaggggttccctgcttacttgcggcgacgtcgaagagaatcccggtccgatggccctcccagtaactgccctccttttgcccctcgcactccttcttcatgccgctcgccccaactgggtcaacgtgattagcgatttgaagaaaatcgaggaccttatacagtctatgcatattgacgctacactgtatactgagagtgatgtacacccgtcctgtaaggtaacggccatgaaatgctttcttctggagctccaggtcatcagcttggagtctggggacgcaagcatccacgatacggttgaaaacctcatcatccttgcgaacaactctctctcatctaatggaaacgttacagagagtgggtgtaaggagtgcgaagagttggaagaaaaaaacatcaaagaatttcttcaatccttcgttcacatagtgcaaatgttcattaacacgtccactaccacacccgccccgaggccacctacgccggcaccgactatcgccagtcaacccctctctctgcgccccgaggcttgccggcctgcggctggtggggcggtccacacccggggcctggattttgcgtgcgatatatacatctgggcacctcttgccggcacctgcggagtgctgcttctctcactcgttattacgctgtactgc

SEQ ID NO: 476 - DNA, 1122 bp, Artificial Sequence; identical to SEQ ID NO: 145
  Synthetic

SEQ ID NO: 477 - DNA, 2118 bp, Artificial Sequence
  Synthetic
atggccttaccagtgaccgccttgctcctgccgctggccttgctgctccacgccgccaggccggatattcagatgacccagagcccgagcagcctgagcgcgagcgtgggcgatcgcgtgaccattacctgccgcgcgagccaggatattagcaaatatctgaactggtatcagcagaaaccgggcggcaccgtgaaactgctgatttatcataccagccgcctgcatagcggcgtgccgagccgctttagcggcagcggcagcggcaccgattttaccctgaccattagcagcctgcagccggaagatattgcgacctatttttgccagcagggcaacaccctgccgtatacctttggcggcggcaccaaactggaaattaccggtggcggtggctcgggcggtggtgggtcgggtggcggcggatctcaggtgcagctgcaggaaagcggcccgggcctggtgaaaccgagccagaccctgagcctgacctgcaccgtgagcggcgtgagcctgccggattatggcgtgagctggattcgccagccgccgggcaaaggcctggaatggattggcgtgatttggggcagcgaaaccacctattataacagcgcgctgaaaagccgcctgaccattagcaaagataacagcaaaaaccaggtgagcctgaaactgagcagcgtgaccgcggcggataccgcggtgtattattgcgcgaaacattattattatggcggcagctatgcgatggattattggggccagggcaccagcgtgaccgtgagcagcaccacgacgccagcgccgcgaccaccaacaccggcgcccaccatcgcgtcgcagcccctgtccctgcgcccagaggcgtgccggccagcggcggggggcgcagtgcacacgagggggctggacttcgcctgtgatatctacatctgggcgcccttggccgggacttgtggggtccttctcctgtcactggttatcaccctttactgccggagggaccagaggctgccccccgatgcccacaagccccctgggggaggcagtttccggacccccatccaagaggagcaggccgacgcccactccaccctggccaagatcagagtgaagttcagcaggagcgcagacgcccccgcgtaccagcagggccagaaccagctctataacgagctcaatctaggacgaagagaggagtacgatgttttggacaagagacgtggccgggaccctgagatggggggaaagccgagaaggaagaaccctcaggaaggcctgtacaatgaactgcagaaagataagatggcggaggcctacagtgagattgggatgaaaggcgagcgccggaggggcaaggggcacgatggcctttaccagggtctcagtacagccaccaaggacacctacgacgcccttcacatgcaggccctgccccctcgcggctctggcgagggaaggggttccctgcttacttgcggcgacgtcgaagagaatcccggtccgatggccctcccagtaactgccctccttttgcccctcgcactccttcttcatgccgctcgccccaactgggtcaacgtgattagcgatttgaagaaaatcgaggaccttatacagtctatgcatattgacgctacactgtatactgagagtgatgtacacccgtcctgtaaggtaacggccatgaaatgctttcttctggagctccaggtcatcagcttggagtctggggacgcaagcatccacgatacggttgaaaacctcatcatccttgcgaacaactctctctcatctaatggaaacgttacagagagtgggtgtaaggagtgcgaagagttggaagaaaaaaacatcaaagaatttcttcaatccttcgttcacatagtgcaaatgttcattaacacgtccactaccacacccgccccgaggccacctacgccggcaccgactatcgccagtcaacccctctctctgcgccccgaggcttgccggcctgcggctggtggggcggtccacacccggggcctggattttgcgtgcgatatatacatctgggcacctcttgccggcacctgcggagtgctgcttctctcactcgttattacgctgtactgc

SEQ ID NO: 478 - DNA, 1443 bp, Artificial Sequence
  Synthetic
atggccttaccagtgaccgccttgctcctgccgctggccttgctgctccacgccgccaggccggatattcagatgacccagagcccgagcagcctgagcgcgagcgtgggcgatcgcgtgaccattacctgccgcgcgagccaggatattagcaaatatctgaactggtatcagcagaaaccgggcggcaccgtgaaactgctgatttatcataccagccgcctgcatagcggcgtgccgagccgctttagcggcagcggcagcggcaccgattttaccctgaccattagcagcctgcagccggaagatattgcgacctatttttgccagcagggcaacaccctgccgtatacctttggcggcggcaccaaactggaaattaccggtggcggtggctcgggcggtggtgggtcgggtggcggcggatctcaggtgcagctgcaggaaagcggcccgggcctggtgaaaccgagccagaccctgagcctgacctgcaccgtgagcggcgtgagcctgccggattatggcgtgagctggattcgccagccgccgggcaaaggcctggaatggattggcgtgatttggggcagcgaaaccacctattataacagcgcgctgaaaagccgcctgaccattagcaaagataacagcaaaaaccaggtgagcctgaaactgagcagcgtgaccgcggcggataccgcggtgtattattgcgcgaaacattattattatggcggcagctatgcgatggattattggggccagggcaccagcgtgaccgtgagcagcaccacgacgccagcgccgcgaccaccaacaccggcgcccaccatcgcgtcgcagcccctgtccctgcgcccagaggcgtgccggccagcggcggggggcgcagtgcacacgagggggctggacttcgcctgtgatatctacatctgggcgcccttggccgggacttgtggggtccttctcctgtcactggttatcaccctttactgccggagggaccagaggctgccccccgatgcccacaagccccctgggggaggcagtttccggacccccatccaagaggagcaggccgacgcccactccaccctggccaagatcagagtgaagttcagcaggagcgcagacgcccccgcgtaccagcagggccagaaccagctctataacgagctcaatctaggacgaagagaggagtacgatgttttggacaagagacgtggccgggaccctgagatggggggaaagccgagaaggaagaaccctcaggaaggcctgtacaatgaactgcagaaagataagatggcggaggcctacagtgagattgggatgaaaggcgagcgccggaggggcaaggggcacgatggcctttaccagggtctcagtacagccaccaaggacacctacgacgcccttcacatgcaggccctgccccctcgc

SEQ ID NO: 479 - protein, 15 aa, Artificial Sequence
  Synthetic
EPKSCDKTHTCPPCP

SEQ ID NO: 480 - protein, 12 aa, Homo sapiens
ERKCCVECPPCP

SEQ ID NO: 481 - protein, 60 aa, Homo sapiens
ELKTPLGDTHTCPRCPEPKSCDTPPPCPRCPEPKSCDTPPPCPRCPEKSCDTPPPCPRCP

SEQ ID NO: 482 - protein, 12 aa, Homo sapiens
ESKYGPPCPSCP

SEQ ID NO: 483 - protein, 12 aa, Artificial Sequence
  Synthetic
ESKYGPPCPPCP

SEQ ID NO: 484 - protein, 9 aa, Artificial Sequence
  Synthetic
YGPPCPPCP

SEQ ID NO: 485 - protein, 10 aa, Artificial Sequence
  Synthetic
KYGPPCPPCP

SEQ ID NO: 486 - protein, 13 aa, Artificial Sequence
  Synthetic
EVVKYGPPCPPCP

SEQ ID NO: 487 - protein, 39 aa, Artificial Sequence
  Synthetic
IEVMYPPPYLDNEKSNGTIIHVKGKHLCPSPLFPGPSKP

SEQ ID NO: 488 - DNA, 20 bp, Homo sapiens
atcaccaagcccgcgaccaa

SEQ ID NO: 489 - DNA, 612 bp, Artificial Sequence
  Synthetic
atggccctcccagtaactgccctccttttgcccctcgcactccttcttcatgccgctcgccccaactgggtcaacgtgattagcgatttgaagaaaatcgaggaccttatacagtctatgcatattgacgctacactgtatactgagagtgatgtacacccgtcctgtaaggtaacggccatgaaatgctttcttctggagctccaggtcatcagcttggagtctggggacgcaagcatccacgatacggttgaaaacctcatcatccttgcgaacaactctctctcatctaatggaaacgttacagagagtgggtgtaaggagtgcgaagagttggaagaaaaaaacatcaaagaatttcttcaatccttcgttcacatagtgcaaatgttcattaacacgtccactaccacacccgccccgaggccacctacgccggcaccgactatcgccagtcaacccctctctctgcgccccgaggcttgccggcctgcggctggtggggcggtccacacccggggcctggattttgcgtgcgatatatacatctgggcacctcttgccggcacctgcggagtgctgcttctctcactcgttattacgctgtactgc

SEQ ID NO: 490 - protein, 204 aa, Artificial Sequence
  Synthetic
MALPVTALLLPLALLLHAARPNWVNVISDLKKIEDLIQSMHIDATLYTESDVHPSCKVTAMKCFLLELQVISLESGDASIHDTVENLIILANNSLSSNGNVTESGCKECEELEEKNIKEFLQSFVHIVQMFINTSTTTPAPRPPTPAPTIASQPLSLRPEACRPAAGGAVHTRGLDFACDIYIWAPLAGTCGVLLLSLVITLYC

SEQ ID NO: 491 - DNA, 20 bp, Homo sapiens
ccgatcgtgaagcgcctgct

SEQ ID NO: 492 - DNA, 20 bp, Homo sapiens
cgagaaggcggtcaagagcc

SEQ ID NO: 493 - DNA, 20 bp, Homo sapiens
cttggtgttgacgttctgcg

SEQ ID NO: 494 - DNA, 20 bp, Homo sapiens
ctctgctgtttcaccatcca

SEQ ID NO: 495 - DNA, 20 bp, Homo sapiens
cccggcttgggcggtgctcc

SEQ ID NO: 496 - DNA, 20 bp, Homo sapiens
cgactaccagttgtccaagc

SEQ ID NO: 497 - DNA, 20 bp, Homo sapiens
gactgagttattggcgtggc

SEQ ID NO: 498 - DNA, 20 bp, Homo sapiens
gaatgttccattgataagcc

SEQ ID NO: 499 - DNA, 20 bp, Homo sapiens
gagaggctgaggtttgcccc

SEQ ID NO: 500 - DNA, 20 bp, Homo sapiens
cctcaccatgcctagccttt

SEQ ID NO: 501 - DNA, 20 bp, Homo sapiens
cgatctggggtgggagttcg

SEQ ID NO: 502 - DNA, 20 bp, Homo sapiens
gtttgaccgctccacgagcc

SEQ ID NO: 503 - DNA, 20 bp, Homo sapiens
gatacggtaggcgtagatga

SEQ ID NO: 504 - DNA, 20 bp, Homo sapiens
gattcacaaccgaattggtg

SEQ ID NO: 505 - DNA, 20 bp, Homo sapiens
gggctcctcggtgtacatca

SEQ ID NO: 506 - DNA, 20 bp, Homo sapiens
ctatttgcggatcttcctgg

SEQ ID NO: 507 - DNA, 20 bp, Homo sapiens
gtactcccctgtatcgttca

SEQ ID NO: 508 - DNA, 20 bp, Homo sapiens
tggggccactcgatccttga

SEQ ID NO: 509 - DNA, 20 bp, Homo sapiens
acctatcatacgtatcctgg

SEQ ID NO: 510 - DNA, 20 bp, Homo sapiens
agtgtacgtcccatcagggt

SEQ ID NO: 511 - DNA, 20 bp, Homo sapiens
atgtggaagtcacgcccgtt

SEQ ID NO: 512 - DNA, 20 bp, Homo sapiens
gcagttgtgtgacacggaag

SEQ ID NO: 513 - DNA, 20 bp, Homo sapiens
cagcttgtccaactggtcgg

SEQ ID NO: 514 - DNA, 20 bp, Homo sapiens
agttgagctggcaatcaggg

SEQ ID NO: 515 - DNA, 20 bp, Homo sapiens
agaagtggaatacagagcgg

SEQ ID NO: 516 - DNA, 20 bp, Homo sapiens
aatgtgactctagcagacag

SEQ ID NO: 517 - DNA, 20 bp, Homo sapiens
ctaaatggggatttccgcaa

SEQ ID NO: 518 - DNA, 20 bp, Homo sapiens
gagtcacattctctatggtc

SEQ ID NO: 519 - DNA, 20 bp, Homo sapiens
tgtacttgacgcatcgcgcc

SEQ ID NO: 520 - DNA, 20 bp, Homo sapiens
tactgacgccaagacagagt

SEQ ID NO: 521 - DNA, 20 bp, Homo sapiens
tatcagccactaatgaagtt

SEQ ID NO: 522 - DNA, 20 bp, Homo sapiens
tgtagactgccaaagtgtat

SEQ ID NO: 523 - protein, 107 aa, Artificial Sequence [sequence omitted]

SEQ ID NO: 524 - protein, 122 aa, Artificial Sequence [sequence omitted]

SEQ ID NO: 525 - protein, 398 aa, Artificial Sequence
  Synthetic
YVMDFQVQIFSFLLISASVIMSRGEIVLTQSPATLSLSPGERATLSCRASQSVSSYLAWYQQKPGQAPRLLIYDASNRATGIPARFSGSGSGTDFTLTISSLEPEDFAVYYCQQRSNWPPTFGQGTKVEIKGSTSGSGKSSEGKGEVQLLESGGGLVQPGGSLRLSCAVSGFTFNSFAMSWVRQAPGKGLEWVSAISGSGGGTYYADSVKGRFTISRDNSKNTLYLQMNSLRAEDTAVYFCAKDKILWFGEPVFDYWGQGTLVTVSSLSNSIMYFSHFVPVFLPAKPTTTPAPRPPTPAPTIASQPLSLRPEACRPAAGGAVHTRGLDFACDIYIWAPLAGTCGVLLLSLVITLYCNHRSQVRKAAITSYEKSDGVYTGLSTRNQETYETLKHEKPPQ

SEQ ID NO: 526 - protein, 6 aa, Artificial Sequence
  Synthetic
QSVSSY

SEQ ID NO: 527 - protein, 4 aa, Artificial Sequence
  Synthetic
  MISC_FEATURE (4)..(4): X is any amino acid
DASX

SEQ ID NO: 528 - protein, 9 aa, Artificial Sequence
  Synthetic
QQRSNWPPT

SEQ ID NO: 529 - protein, 8 aa, Artificial Sequence
  Synthetic
GFTFNSFA

SEQ ID NO: 530 - protein, 9 aa, Artificial Sequence
  Synthetic
ISGSGGGTY

SEQ ID NO: 531 - protein, 15 aa, Artificial Sequence
  Synthetic
AKDKILWFGEPVFDY

SEQ ID NO: 532 - protein, 243 aa, Artificial Sequence
  Synthetic
DIQMTQSTSSLSASLGDRVTISCSASQGINNYLNWYQQKPDGTVELLIYYTSTLQSGVPSRFSGSGSGTDYSLTISNLEPEDIGTYYCQQYSKLPRTFGGGTKLEIKGSTSGSGKSSEGKGQVQLQQSGSELMMPGASVKISCKATGYTFSNYWIEWVKQRPGHGLEWIGEILPGTGRTIYNEKFKGKATFTADISSNTVQMQLSSLTSEDSAVYYCARRDYYGNFYYAMDYWGQGTSVTVSS

SEQ ID NO: 533 - protein, 107 aa, Artificial Sequence
  Synthetic
DIQMTQSTSSLSASLGDRVTISCSASQGINNYLNWYQQKPDGTVELLIYYTSTLQSGVPSRFSGSGSGTDYSLTISNLEPEDIGTYYCQQYSKLPRTFGGGTKLEIK

SEQ ID NO: 534 - protein, 122 aa, Artificial Sequence
  Synthetic
QVQLQQSGSELMMPGASVKISCKATGYTFSNYWIEWVKQRPGHGLEWIGEILPGTGRTIYNEKFKGKATFTADISSNTVQMQLSSLTSEDSAVYYCARRDYYGNFYYAMDYWGQGTSVTVSS

SEQ ID NO: 535 - protein, 353 aa, Artificial Sequence
  Synthetic
MDFQVQIFSFLLISASVIMSRGDIQMTQSTSSLSASLGDRVTISCSASQGINNYLNWYQQKPDGTVELLIYYTSTLQSGVPSRFSGSGSGTDYSLTISNLEPEDIGTYYCQQYSKLPRTFGGGTKLEIKGSTSGSGKSSEGKGQVQLQQSGSELMMPGASVKISCKATGYTFSNYWIEWVKQRPGHGLEWIGEILPGTGRTIYNEKFKGKATFTADISSNTVQMQLSSLTSEDSAVYYCARRDYYGNFYYAMDYWGQGTSVTVSSAAAKGKHLCPSPLFPGPSKPFWVLVVVGGVLACYSLLVTVAFIIFWVRSKRSRLLHSDYMNMTPRRPGPTRKHYQPYAPPRDFAAYRS

SEQ ID NO: 536 - protein, 6 aa, Artificial Sequence
  Synthetic
QGINNY

SEQ ID NO: 537 - protein, 4 aa, Artificial Sequence
  Synthetic
  MISC_FEATURE (4)..(4): X is any amino acid
YTSX

SEQ ID NO: 538 - protein, 9 aa, Artificial Sequence
  Synthetic
QQYSKLPRT

SEQ ID NO: 539 - protein, 8 aa, Artificial Sequence
  Synthetic
GYTFSNYW

SEQ ID NO: 540 - protein, 9 aa, Artificial Sequence
  Synthetic
ILPGTGRTI

SEQ ID NO: 541 - protein, 15 aa, Artificial Sequence
  Synthetic
ARRDYYGNFYYAMDY

SEQ ID NO: 542 - protein, 243 aa, Artificial Sequence; identical to SEQ ID NO: 532
  Synthetic

SEQ ID NO: 543 - protein, 353 aa, Artificial Sequence; identical to SEQ ID NO: 535
  Synthetic

SEQ ID NO: 544 - DNA, 20 bp, Homo sapiens
tgggcagtcctattacagct

SEQ ID NO: 545 - DNA, 20 bp, Homo sapiens
atgatagtcactgacaacaa

SEQ ID NO: 546 - DNA, 20 bp, Homo sapiens
agttgctcatgcaggatttc

SEQ ID NO: 547 - DNA, 20 bp, Homo sapiens
gaagccacaggaagtctgtg

SEQ ID NO: 548 - DNA, 20 bp, Homo sapiens
gaagctcattgttgggatcc

SEQ ID NO: 549 - DNA, 20 bp, Homo sapiens
aacaactatcgttaccacag

SEQ ID NO: 550 - DNA, 20 bp, Homo sapiens
tgaacaggaaataacctatg

SEQ ID NO: 551 - DNA, 20 bp, Homo sapiens
ggttttcgttgctgcctctt

SEQ ID NO: 552 - DNA, 20 bp, Homo sapiens
tccccgaaaaggtcgaattt

SEQ ID NO: 553 - DNA, 20 bp, Homo sapiens
atctgcggcagcttgcttag

SEQ ID NO: 554 - DNA, 20 bp, Homo sapiens
gggtattattgatgctattc

SEQ ID NO: 555 - DNA, 20 bp, Homo sapiens
gatttcctcctcgaccacca

SEQ ID NO: 556 - DNA, 20 bp, Homo sapiens
cttcgaatcgaataccaaga

SEQ ID NO: 557 - DNA, 20 bp, Homo sapiens
gcttaaacaatttgacagtg

SEQ ID NO: 558 - DNA, 20 bp, Homo sapiens
ccaagacggaaaattcagat

SEQ ID NO: 559 - DNA, 20 bp, Homo sapiens
ccaatctgaattttccgtct

SEQ ID NO: 560 - DNA, 20 bp, Homo sapiens
cggtccagctgacgtcttaa

SEQ ID NO: 561 - DNA, 20 bp, Homo sapiens
catcttggtactcaatccgc

SEQ ID NO: 562 - DNA, 20 bp, Homo sapiens
gcacctacagaagatgccgg

SEQ ID NO: 563 - DNA, 20 bp, Homo sapiens
gacagcgtgaacaggtagct

SEQ ID NO: 564 - DNA, 20 bp, Homo sapiens
gacagcgtgaacaggtagct

SEQ ID NO: 565 - DNA, 20 bp, Homo sapiens
actcaatgcgtacattggtg

SEQ ID NO: 566 - DNA, 20 bp, Homo sapiens
ttgccggctgagaaccagat

SEQ ID NO: 567 - DNA, 20 bp, Homo sapiens
gagaagtagcagccatgtac

SEQ ID NO: 568 - DNA, 20 bp, Homo sapiens
gcccataggtgaaggcgtct

SEQ ID NO: 569 - DNA, 20 bp, Homo sapiens
ccaatcatgctgctggtgga

SEQ ID NO: 570 - protein, 118 aa, Artificial Sequence
  Synthetic
EVQLQQSGPELVKPGASVKMSCKASGYTFTSYVMHWVKQKPGQGPDWIGYINPYNDATKYNEKFKGKATLTSDKSSSTAYMELSSLTSEDSAVYYCARGGYDYDGDYWGQGTTLTVSS

SEQ ID NO: 571 - protein, 131 aa, Artificial Sequence
  Synthetic
SYNTHETICEVQLQQSGPELVKPGASVKMSCKASGYTFTRYILHWVKLKPGQGLEWIGYINPYNDGTKYNEKFKGKATLTSDKSSSTAYMELSRLTSYDSAVYYCARDSSGYGGAYAMDFWGQGTSVTVSS

SEQ ID NO: 572 - protein, 120 aa, Artificial Sequence
  Synthetic
EVQLVESGGGLVKPGGSLKLSCAASGFTFSSYAMSWVRQTPEKRLEWVAAINSNGGNTYYPDTVKDRFTISRDNAKNTLYLQMSSLRSEDTALYYCARHRGGFYYAVDYWGQGTSVTVSS

SEQ ID NO: 573 - protein, 116 aa, Artificial Sequence
  Synthetic
EVQLQQSGPELVKPGASVKISCKASGYSFTGYYIDWVKQSPGKSLEWIGYIYPSNGETSYNQKFKGKATLTVDKSSSTVNMQLNSLTSEDSAVYYCARESYAMDYWGQGTSVTVSS

SEQ ID NO: 574 - protein, 119 aa, Artificial Sequence
  Synthetic
DVQLQESGPGLVKPSQTVSLTCTVTGYSITNGNHWWSWIRQVSGSKLEWMGYISSSGSTDSNPSLKSRISITRDTSKNQLFLHLNSVTTEDIATYYCATTGTWGYFDYWGQGTTLTVSS

SEQ ID NO: 575 - protein, 118 aa, Artificial Sequence
  Synthetic
EVQLQQSGPELVKPGTSVKMSCKASGYTFTSYVMHWVKQKPGQGLEWIGYVIPYNDGTKYNEKFKGKATLTSDKSSSTAYMELSSLTSEDSAVYYCARPSNWDEFDYWGQGTTLTVSS

SEQ ID NO: 576 - protein, 116 aa, Artificial Sequence
  Synthetic
QVQLQQPGAELVKPGASVKLSCKASGYTFTNYWMNWVKQRPGRGLEWIGRIHPSDSETHYNQKFKTKATLTVDKSSSTAYIQLSSLTSEDSAVYYCARYDGYFAYWGQGTLVTVSA

SEQ ID NO: 577 - protein, 120 aa, Artificial Sequence
  Synthetic
QVTLKESGPGILQPSQTLSLTCSFSGFSLSTFGMGVGWIRQPSGKGLEWLAHIWWDDDKYYNPALKSRLTISKDTSKNQVFLKIANVDIADTATYYCARTYDYDEYFDYWGQGTTLTVSS

SEQ ID NO: 578 - protein, 119 aa, Artificial Sequence
  Synthetic
QVQLQQPGAELVQPGASVKLSCKASGYTFTSYWMNWMKQRPGRGLEWIGRIHPSDSETHYNQKFRTKATLTVDKSSSTAYIQLSSLTSEDSAVYYCAREDGYYWYFDVWGAGTTVTVSS

SEQ ID NO: 579 - protein, 117 aa, Artificial Sequence
  Synthetic
EVQLQQSGAELVKPGASVKIPCKASGYKFTDFNMDWVKQSHGKSLEWIGDINPNSGGTIYNQKFKGKATLTVDKSLSTAYMELGSLTSEDTAVYYCARWDYGNFAYWGQGTLVTVSA

SEQ ID NO: 580 - protein, 119 aa, Artificial Sequence
  Synthetic
QVQLQQPGAELVKPGASVKLSCKASGYTFTNYWMNWVKQRPGRGLEWIGRIHPSDSETHYNQKFKSKATLTVDKSSSTAYIQLSSLTSEDSAVYYCAREDGYYWYFDVWGAGTTVTVSS

SEQ ID NO: 581 - protein, 120 aa, Artificial Sequence
  Synthetic
EVQLVESGGGLVKPGGSLKLSCAASGFTFSSYAMSWVRQTPEKRLEWVAAINSNGGRNYYPDTVKDRFTISRDNAKNTLYLQMSSLRSEDTALYYCARHRGGYYYAMDYWGQGTSVTVSS

SEQ ID NO: 582 - protein, 107 aa, Artificial Sequence
  Synthetic
DIQMNQSPSSLSASLGDSITITCHASQNINVWLSWYQQKPGNIPKLLIYKASNLHTGVPSRFSGSGSGTGFTLTISSLQPEDIATYYCQQGQSYPFTFGSGTKLEIK

SEQ ID NO: 583 - protein, 107 aa, Artificial Sequence
  Synthetic
DIQMTQSPASLSASVGETVTITCRASGNIHNYLAWYQQKQGRSPQLLVYNAKTLPYGVPSRFSGSGSGTQYSLKINSLQPEDFGSYYCQHFWTTPWTFGGGTKLEIK

SEQ ID NO: 584 - protein, 112 aa, Artificial Sequence
  Synthetic
NIMMTQSPSSLAVSAGEKVTMSCKSSQSVLYSSNQKNYLAWYQQKPGQSPKLLIYWASTRESGVPDRFTGSGSGTDFTLTISSVQAEDLAVYYCHQYLSSRTFGGGTKLEIK

SEQ ID NO: 585 - protein, 111 aa, Artificial Sequence
  Synthetic
DIVLTQSPASLAVSLGQRATISCRASKSVSTSGYSYMHWYQQKPGQPPKLLIYLASNLESGVPARFSGSGSGTDFTLNIHPVEEEDAATYYCQHSRELPYTFGGGTKLEIK

SEQ ID NO: 586 - protein, 107 aa, Artificial Sequence
  Synthetic
NIVMTQSPKSMSMSVGERVTLSCKASENVGTYVSWYQQKPEQSPKLLIYGASNRFTGVPDRFTGSGSATDFTLTISSVQAEDLADYHCGQSYSYPFTFGSGTKLEIK

SEQ ID NO: 587 - protein, 107 aa, Artificial Sequence
  Synthetic
DIVMTQSQKFMSTSVGDRVSITCKASQNVRTAVAWYQQKPGQSPKALIYLASNRHTGVPDRFTGSGSGTDFTLTISNVQSEDLADYFCLQHWNYPLTFGAGTKLELK

SEQ ID NO: 588 - protein, 107 aa, Artificial Sequence
  Synthetic
DIQMTQSSSYLSVSLGGRVTITCKASDHINNWLAWYQQKPGNAPRLLISGATSLETGDPSRFSGSGSGKDYTLSITSLQIEDVATYYCQQYWSIPFTFGAGTKLELK

SEQ ID NO: 589 - protein, 112 aa, Artificial Sequence
  Synthetic
DIVMTQAAFSNPVTLGTSASISCRSSKSLLHSNGITYFYWYLQKPGQSPQLLIYQMSNLASGVPDRFSSSGSGTDFTLRISRVEAEDVGVYYCAQNLELPFTFGSGTKLEIK

SEQ ID NO: 590 - protein, 111 aa, Artificial Sequence
  Synthetic
NIVLTQSPASLAVSLGQRATISCRASESVDIYGNSFMHWYQQKPGQPPKLLIYLASNLESGVPARFSGSGSRTDFTLTIDPVEADDAATYYCQQNNEDPWTFGGGTKLEIK

SEQ ID NO: 591 - protein, 112 aa, Artificial Sequence
  Synthetic
DIVMTQAAFSNPVTLGTSASISCRSSKSLLHSNGITYLYWYLQKPGQSPQLLIYQMSNLASGVPDRFSSSGSGTDFTLRISRVEAEDVGVYYCAQNLELPLTFGAGTKLELK

SEQ ID NO: 592 - protein, 111 aa, Artificial Sequence
  Synthetic
NIVLTQSPASLAVSLGQRATISCRASESVDSYGNSFMHWYQQKPGQPPKLLIYLASNLESGVPARFSGSGSRTDFTLTIDPVEADDAATYYCQQNHEDPWTFGGGTKLEIK

SEQ ID NO: 593 - protein, 112 aa, Artificial Sequence
  Synthetic
DIVMSQSPSSLAVSVGEKVTMSCKSSQSLLYSSNQKNYLAWYQQKPGQSPKLLIYWASTRESGVPDRFTGSGSGTDFTLTISSVKAEDLAVYYCQQYYTYLTFGAGTKLELK

SEQ ID NO: 594 - protein, 918 aa, Artificial Sequence
  Synthetic
MALPVTALLLPLALLLHAARPDIQMTQSPSSLSASVGDRVTITCSASSSVSYMYWYQQKPGKAPKLLIYLTSNLASGVPSRFSGSGSGTDFTLTISSLQPEDFATYYCQQWRSNPFTFGQGTKLEIKRGGGGSGGGGSGGGGSQITLKESGPTLVKPTQTLTLTCTFSGFSLSTSGMGVGWIRQPPGKALEWLAHIWWDDVKRYSPSLKSRLTITKDTSKNQVVLTMTNMDPVDTATYYCARIVSFDNDVVSAMDYWGQGTLVTVSSTREQKLISEEDLAKPTTTPAPRPPTPAPTIASQPLSLRPEACRPAAGGAVHTRGLDFACDIYIWAPLAGTCGVLLLSLVITLYCGRARVKFSRSADAPAYQQGQNQLYNELNLGRREEYDVLDKRRGRDPEMGGKPRRKNPQEGLYNELQKDKMAEAYSEIGMKGERRRGKGHDGLYQGLSTATKDTYDALHMQALPPRSRGSGATNFSLLKQAGDVEENPGPGIHMATYEVLCEVARKLGTDDREVVLFLLNVFIPQPTLAQLIGALRALKEEGRLTFPLLAECLFRAGRRDLLRDLLHLDPRFLERHLAGTMSYFSPYQLTVLHVDGELCARDIRSLIFLSKDTIGSRSTPQTFLHWVYCMENLDLLGPTDVDALMSMLRSLSRVDLQRQVQTLMGLHLSGPSHSQHYRHTPLETDFYDYKDDDDKTSGSGEGRGSLLTCGDVEENPGPHMTEYKPTVRLATRDDVPRAVRTLAAAFADYPATRHTVDPDRHIERVTELQELFLTRVGLDIGKVWVADDGAAVAVWTTPESVEAGAVFAEIGPRMAELSGSRLAAQQQMEGLLAPHRPKEPAWFLATVGVSPDHQGKGLGSAVVLPGVEAAERAGVPAFLETSAPRNLPFYERLGFTVTADVEVPEGPRTWCMTRKPGA

SEQ ID NO: 595 - protein, 913 aa, Artificial Sequence
  Synthetic
MALPVTALLLPLALLLHAARPEIVMTQSPATLSVSPGERATLSCKASQSVSNDVVWYQQKPGQAPRLLIYYASNRYTGIPARFSGSGSGTEFTLTISSLQSEDFAVYYCQQDYTSPWTFGQGTKLEIKRGGGGSGGGGSGGGGSQVQLVQSGAEVKKPGASVKVSCKASGYTFTNYGMNWVRQAPGQGLEWMGWINTYTGEPTYADDFKGRVTMTTDTSTSTAYMELRSLRSDDTAVYYCARIGDSSPSDYWGQGTLVTVSSTREQKLISEEDLAKPTTTPAPRPPTPAPTIASQPLSLRPEACRPAAGGAVHTRGLDFACDIYIWAPLAGTCGVLLLSLVITLYCGRARVKFSRSADAPAYQQGQNQLYNELNLGRREEYDVLDKRRGRDPEMGGKPRRKNPQEGLYNELQKDKMAEAYSEIGMKGERRRGKGHDGLYQGLSTATKDTYDALHMQALPPRSRGSGATNFSLLKQAGDVEENPGPGIHMATYEVLCEVARKLGTDDREVVLFLLNVFIPQPTLAQLIGALRALKEEGRLTFPLLAECLFRAGRRDLLRDLLHLDPRFLERHLAGTMSYFSPYQLTVLHVDGELCARDIRSLIFLSKDTIGSRSTPQTFLHWVYCMENLDLLGPTDVDALMSMLRSLSRVDLQRQVQTLMGLHLSGPSHSQHYRHTPLETDFYDYKDDDDKTSGSGEGRGSLLTCGDVEENPGPHMTEYKPTVRLATRDDVPRAVRTLAAAFADYPATRHTVDPDRHIERVTELQELFLTRVGLDIGKVWVADDGAAVAVWTTPESVEAGAVFAEIGPRMAELSGSRLAAQQQMEGLLAPHRPKEPAWFLATVGVSPDHQGKGLGSAVVLPGVEAAERAGVPAFLETSAPRNLPFYERLGFTVTADVEVPEGPRTWCMTRKPGA

SEQ ID NO: 596 - DNA, 738 bp, Artificial Sequence
  Synthetic
gacatccagatgacccagagccccagcagcctgtctgccagcgtgggcgacagagtgaccatcacctgtagcgccagcagcagcgtgtcctacatgtactggtatcagcagaagcccggcaaggcccccaagctgctgatctacctgaccagcaatctggcctccggcgtgcccagcagattttctggcagcggctccggcaccgacttcaccctgacaatcagctccctccagcccgaggacttcgccacctactactgtcagcagtggcggagcaaccccttcaccttcggccagggcaccaagctggaaatcaagagaggcggaggcggaagtggaggcggaggatctggcggcggaggctctcagatcaccctgaaagagtccggccccaccctcgtgaagcctacccagaccctgacactgacctgcaccttcagcggcttcagcctgagcacaagcggcatgggcgtgggctggatcagacagcctcctggaaaggccctggaatggctggcccacatttggtgggacgacgtgaagcggtacagccccagcctgaagtcccggctgaccattaccaaggacaccagcaagaaccaggtggtgctgaccatgacaaacatggaccccgtggacaccgccacatattactgcgcccggatcgtgtccttcgacaacgacgtggtgtccgctatggactactggggccagggaaccctcgtgaccgtgtctagt

SEQ ID NO: 597 - DNA, 723 bp, Artificial Sequence
  Synthetic
gagatcgtgatgacccagagccctgccaccctgtccgtgtctccaggcgaaagagccaccctgagctgcaaggcttcccagagcgtgtccaacgacgtcgtgtggtatcagcagaagcccggccaggcccccagactgctgatctactacgccagcaacagatacaccggcatccccgccagattcagcggctctggcagcggcaccgagttcaccctgacaatcagcagcctccagagcgaggacttcgccgtgtactactgtcagcaggactacaccagcccctggaccttcggccagggcaccaagctggaaatcaagagaggcggaggcggaagtggaggcggaggatctggcggcggaggctctcaggtgcaactggtgcagagcggagccgaagtgaagaaacctggggccagcgtgaaggtgtcctgcaaggccagcggctacacctttaccaactacggcatgaactgggtgcgccaggctcctggacagggcctggaatggatgggctggatcaacacctacaccggcgagcccacctacgccgacgacttcaagggcagagtgaccatgaccaccgacaccagcacctccaccgcctacatggaactgcggagcctgagaagcgacgacaccgccgtgtattattgcgcccggatcggcgacagcagccccagcgattattggggccagggaaccctcgtgaccgtgtcctct

SEQ ID NO: 598 - protein, 246 aa, Artificial Sequence
  Synthetic
DIQMTQSPSSLSASVGDRVTITCSASSSVSYMYWYQQKPGKAPKLLIYLTSNLASGVPSRFSGSGSGTDFTLTISSLQPEDFATYYCQQWRSNPFTFGQGTKLEIKRGGGGSGGGGSGGGGSQITLKESGPTLVKPTQTLTLTCTFSGFSLSTSGMGVGWIRQPPGKALEWLAHIWWDDVKRYSPSLKSRLTITKDTSKNQVVLTMTNMDPVDTATYYCARIVSFDNDVVSAMDYWGQGTLVTVSS

SEQ ID NO: 599 - protein, 241 aa, Artificial Sequence
  Synthetic
EIVMTQSPATLSVSPGERATLSCKASQSVSNDVVWYQQKPGQAPRLLIYYASNRYTGIPARFSGSGSGTEFTLTISSLQSEDFAVYYCQQDYTSPWTFGQGTKLEIKRGGGGSGGGGSGGGGSQVQLVQSGAEVKKPGASVKVSCKASGYTFTNYGMNWVRQAPGQGLEWMGWINTYTGEPTYADDFKGRVTMTTDTSTSTAYMELRSLRSDDTAVYYCARIGDSSPSDYWGQGTLVTVSS

SEQ ID NO: 600 - protein, 118 aa, Artificial Sequence
  Synthetic
QVQLQQSGSEMARPGASVKLPCKASGDTFTSYWMHWVKQRHGHGPEWIGNIYPGSGGTNYAEKFKNKVTLTVDRSSRTVYMHLSRLTSEDSAVYYCTRSGGPYFFDYWGQGTTLTVSS

SEQ ID NO: 601 - protein, 115 aa, Artificial Sequence
  Synthetic
DILMTQSPLSLPVSLGDQASISCRSSQNIVHNNGITYLEWYLQRPGQSPKLLIYKVSDRFSGVPDRFSGSGSGTDFTLKISRVEAEDLGIYYCFQGSHIPPTFGGGTKLEIKRAA

SEQ ID NO: 602 - protein, 486 aa, Artificial Sequence
  Synthetic
MGGLEPCSRFLLLPLLLAVSGLRPVQVQAQSDCSCSTVSPGVLAGIVMGDLVLTVLIALAVYFLGRLVPRGRGAAEAATRKQRITETESPYQELQGQRSDVYSDLNTQRPYYKVEGGGEGRGSLLTCGDVEENPGPRMALPVTALLLPLALLLHAARPGSDVQLQESGPSLVKPSQSLSLTCTVTGYSITSDFAWNWIRQFPGNKLEWMGYISYSGNTRYNPSLKSRISITRDTSKNQFFLQLNSVTIEDTATYYCVTAGRGFPYWGQGTLVTVSAGGGGSGGGGSSGGGSDILMTQSPSSMSVSLGDTVSITCHSSQDINSNIGWLQQRPGKSFKGLIYHGTNLDDEVPSRFSGSGSGADYSLTISSLESEDFADYYCVQYAQFPWTFGGGTKLEIKRASGGGGSGGGGSSPTEPSSKTGNPRHLHVLIGTSVVKIPFTILLFFLLHRWCSNKKNAAVMDQEPAGNRTVNSEDSDEQDHQEVSYA

SEQ ID NO: 603 - protein, 483 aa, Artificial Sequence
  Synthetic
MALPVTALLLPLALLLHAARPDVQLQESGPSLVKPSQSLSLTCTVTGYSITSDFAWNWIRQFPGNKLEWMGYISYSGNTRYNPSLKSRISITRDTSKNQFFLQLNSVTIEDTATYYCVTAGRGFPYWGQGTLVTVSAGGGGSGGGGSSGGGSDILMTQSPSSMSVSLGDTVSITCHSSQDINSNIGWLQQRPGKSFKGLIYHGTNLDDEVPSRFSGSGSGADYSLTISSLESEDFADYYCVQYAQFPWTFGGGTKLEIKRTTTPAPRPPTPAPTIASQPLSLRPEACRPAAGGAVHTRGLDFACDIYIWAPLAGTCGVLLLSLVITLYCKRGRKKLLYIFKQPFMRPVQTTQEEDGCSCRFPEEEEGGCELRVKFSRSADAPAYQQGQNQLYNELNLGRREEYDVLDKRRGRDPEMGGKPRRKNPQEGLYNELQKDKMAEAYSEIGMKGERRRGKGHDGLYQGLSTATKDTYDALHMQALPPR

SEQ ID NO: 604 - protein, 483 aa, Artificial Sequence
  Synthetic
MALPVTALLLPLALLLHAARPQVQLQESGPGLVKPSQTLSLTCTVSGYSISSDFAWNWIRQPPGKGLEWMGYISYSGNTRYQPSLKSRITISRDTSKNQFFLKLNSVTAADTATYYCVTAGRGFPYWGQGTLVTVSSGGGGSGGGGSSGGGSDIQMTQSPSSMSVSVGDRVTITCHSSQDINSNIGWLQQKPGKSFKGLIYHGTNLDDGVPSRFSGSGSGTDYTLTISSLQPEDFATYYCVQYAQFPWTFGGGTKLEIKRTTTPAPRPPTPAPTIASQPLSLRPEACRPAAGGAVHTRGLDFACDIYIWAPLAGTCGVLLLSLVITLYCKRGRKKLLYIFKQPFMRPVQTTQEEDGCSCRFPEEEEGGCELRVKFSRSADAPAYQQGQNQLYNELNLGRREEYDVLDKRRGRDPEMGGKPRRKNPQEGLYNELQKDKMAEAYSEIGMKGERRRGKGHDGLYQGLSTATKDTYDALHMQALPPR

SEQ ID NO: 605 - protein, 482 aa, Artificial Sequence
  Synthetic
MALPVTALLLPLALLLHAARPEVQLQESGPGLVKPSQTLSLTCTVSGYSISRDFAWNWIRQPPGKGLEWMGYISYNGNTRYQPSLKSRITISRDTSKNQFFLKLNSVTAADTATYYCVTASRGFPYWGQGTLVTVSSGGGGSGGGGSSGGGSDIQMTQSPSSMSVSVGDRVTITCHSSQDINSNIGWLQQKPGKSFKGLIYHGTNLDDGVPSRFSGSGSGTDYTLTISSLQPEDFATYYCVQYAQFPWTFGGGTKLEIKTTTPAPRPPTPAPTIASQPLSLRPEACRPAAGGAVHTRGLDFACDIYIWAPLAGTCGVLLLSLVITLYCKRGRKKLLYIFKQPFMRPVQTTQEEDGCSCRFPEEEEGGCELRVKFSRSADAPAYQQGQNQLYNELNLGRREEYDVLDKRRGRDPEMGGKPRRKNPQEGLYNELQKDKMAEAYSEIGMKGERRRGKGHDGLYQGLSTATKDTYDALHMQALPPR

SEQ ID NO: 606 - protein, 121 aa, Artificial Sequence
  Synthetic
EVQLLESGGGLVQPGGSLRLSCAASGFTFSNYDMSWVRQAPGKGLEWVSGISHSSGSKYYADSVKGRFTISRDNSKNTLYLQMNSLRAEDTAVYYCAKDATPRPLKPFDYWGQGTLVTVSS

SEQ ID NO: 607 - protein, 121 aa, Artificial Sequence
  Synthetic
EVQLLESGGGLVQPGGSLRLSCAASGFTFSNYDMSWVRQAPGKCLEWVSGISHSSGSKYYADSVKGRFTISRDNSKNTLYLQMNSLRAEDTAVYYCAKDATPRPLKPFDYWGQGTLVTVSS

SEQ ID NO: 608 - protein, 111 aa, Artificial Sequence
  Synthetic
QSVLTQPPSASGTPGQRVTISCTGSSSNIGNNDVSWYQQLPGTAPKLLIYDDNKRPSGVPDRFSGSKSGTSASLAISGLRSEDEADYYCGSWDASLNAYVFGGGTKLTVLG

SEQ ID NO: 609 - protein, 111 aa, Artificial Sequence
  Synthetic
QSVLTQPPSASGTPGQRVTISCTGSSSNIGNNDVSWYQQLPGTAPKLLIYDDNKRPSGVPDRFSGSKSGTSASLAISGLRSEDEADYYCGSWDASLNAYVFGCGTKLTVLG

SEQ ID NO: 610 - protein, 126 aa, Artificial Sequence
  Synthetic
EVQLVQSGAEVKKPGSSVKVSCKASGGTFSSYAISWVRQAPGQGLEWMGGIIPIFGTANYAQKFQGRVTITADESTSTAYMELSSLRSEDTAVYYCAREEGPYCSSTSCYGAFDIWGQGTLVTVSS

SEQ ID NO: 611 - protein, 126 aa, Artificial Sequence
  Synthetic
EAQLVQSGAEGKKPGSSVKVSCKAPGGTFNSYAISWVRQAPGQGLEWMGGIIPIFGTAYYAQKFQGRVTITADESTSTAYMELSSLRSEDTAVYYCAREEGPYCSSTSCYGAFDIWGRGTLVTVSS

SEQ ID NO: 612 - protein, 126 aa, Artificial Sequence
  Synthetic
EVQLVQSGAEVKKPGSSVKVSCKASGGTFSSYAIGWVRQAPGQGLEWMGGIIPIFGIANYAQKFQGRVTITADESTSSAYMELSSLRSEDTAVYYCAREEGPYCSSTSCYGAFDIWGQGTLVTVSS

SEQ ID NO: 613 - protein, 126 aa, Artificial Sequence; identical to SEQ ID NO: 612
  Synthetic

SEQ ID NO: 614 - protein, 126 aa, Artificial Sequence
  Synthetic
EVQLVQSGAEVKKPGSSVKVSCKASGGTFSSYAISWVRQAPGQGLEWMGGIIPIFGTANYAQKFQGRVTITADESTSTAYMELSSLRSEDTAVYYCAREEGPYCSSTSCYAAFDIWGQGTLVTVSS

SEQ ID NO: 615 - protein, 126 aa, Artificial Sequence
  Synthetic
EVQLVQSGAEVKKPGSSVKVSCKASGGTFSSYAISWVRQAPGQGLEWVGGIIPIFGTANYAQKFQGRVKITADESASTAYMELSSLRSEDTAVYYCAREEGPYCSSTSCYGAFDIWGQGTLVTVSS

SEQ ID NO: 616 - protein, 126 aa, Artificial Sequence
  Synthetic
EVQLVQSGAEVKKLGSSVKVSCKASGGTFSSYAISWVRQAPGQGLEWVGGIIPIFGTANYAQKFQGRVKITADESASTAYMELSSLRSEDTAVYYCAREEGPYCSSTSCYGAFDIWGQGTLVTVSS

SEQ ID NO: 617 - protein, 126 aa, Artificial Sequence; identical to SEQ ID NO: 615
  Synthetic

SEQ ID NO: 618 - protein, 126 aa, Artificial Sequence; identical to SEQ ID NO: 615
  Synthetic

SEQ ID NO: 619 - protein, 126 aa, Artificial Sequence; identical to SEQ ID NO: 615
  Synthetic

SEQ ID NO: 620 - protein, 126 aa, Artificial Sequence; identical to SEQ ID NO: 615
  Synthetic

SEQ ID NO: 621 - protein, 251 aa, Artificial Sequence
  Synthetic
DIVMTQTPLSSPVTLGQPASISCRSSQSLVHSDGNTYLSWLQQRPGQPPRLLIYKISNRFFGVPDRFSGSGAGTDFTLKISRVEAEDVGVYYCMQATQFPHTFGQGTKLEIKGGSEGKSSGSGSESKSTGGSQVTLKESGPVLVKPTETLTLTCTVSGFSLTNIRMSVSWIRQPPGKALEWLAHIFSNDEKSYSSSLKSRLTISRDTSKSQVVLTLTNVDPVDTATYYCARMRLPYGMDVWGQGTTVTVSS

SEQ ID NO: 622 - protein, 251 aa, Artificial Sequence
  Synthetic
QVTLKESGPVLVKPTETLTLTCTVSGFSLTNIRMSVSWIRQPPGKALEWLAHIFSNDEKSYSSSLKSRLTISRDTSKSQVVLTLTNVDPVDTATYYCARMRLPYGMDVWGQGTTVTVSSGGSEGKSSGSGSESKSTGGSDIVMTQTPLSSPVTLGQPASISCRSSQSLVHSDGNTYLSWLQQRPGQPPRLLIYKISNRFFGVPDRFSGSGAGTDFTLKISRVEAEDVGVYYCMQATQFPHTFGQGTKLEIK

SEQ ID NO: 623 - protein, 252 aa, Artificial Sequence
  Synthetic
QLQLQESGPGLVKPSETLSLTCTVSGGSLSSSSYWWGWTRQPPGRGLEWIGTMYYSGNIYYNPSLQSRATISVDTSKNQFSLKLSSVTAADTAVYYCARHVGYSYGRRFWYFDLWGRGTLVTVSSGGSEGKSSGSGSESKSTGGSEIVLTQSPATLSLSPGERATLSCRASQSVSSYLAWYQQKPGQAPRLLIYDASNRATGIPARFSGSGSGTDFTLTISSLEPEDFAVYYCQQRSNWPPTFGQGTKVEIK

SEQ ID NO: 624 - protein, 252 aa, Artificial Sequence
  Synthetic
EIVLTQSPATLSLSPGERATLSCRASQSVSSYLAWYQQKPGQAPRLLIYDASNRATGIPARFSGSGSGTDFTLTISSLEPEDFAVYYCQQRSNWPPTFGQGTKVEIKGGSEGKSSGSGSESKSTGGSQLQLQESGPGLVKPSETLSLTCTVSGGSLSSSSYWWGWTRQPPGRGLEWIGTMYYSGNIYYNPSLQSRATISVDTSKNQFSLKLSSVTAADTAVYYCARHVGYSYGRRFWYFDLWGRGTLVTVSS

SEQ ID NO: 625 - protein, 246 aa, Artificial Sequence
  Synthetic
EIVLTQSPATLSLSPGERATLSCRASQSVSSYLAWYQQKPGQAPRLLIYDASNRATGIPARFSGSGSGTDFTLTISSLEPEDFAVYYCQQRSNWPLTFGQGTKVEIKGTEGKSSGSGSESKSTEVQLVQSGAEVKKPGESLKISCKGSGYSFTSYFIGWVRQMPGKGLEWMGIIYPGKSDTRYSPSFQGQVTISADKSISTAYLQWSSLKASDTAMYYCARVYSFGGRHKALFDYWGQGTLVTVSS

SEQ ID NO: 626 - protein, 243 aa, Artificial Sequence
  Synthetic
DIQMTQSPSSLSASVGDRVTITCRASQSISSYLNWYQQKPGKAPKLLIYAASSLQSGVPSRFSGSGSGTDFTLTISSLQPEDFATYYCQQSYSTPLTFGQGTKVEIKGTEGKSSGSGSESKSTQVQLVQSGAEVKKPGSSVKVSCKASGGTFSSYAISWVRQAPGQGLEWMGGIIPIFGTANYAQKFQGRVTITADESTSTAYMELSSLRSEDTAVYYCARESRWRGYKLDYWGQGTLVTVSS

SEQ ID NO: 627 - protein, 241 aa, Artificial Sequence
  Synthetic
DIQMTQSPSSLSASVGDRVTITCKASQNVATHVGWYQQKPGKAPKRLIYSASYRYSGVPSRFSGSGSGTEFTLTISNLQPEDFATYYCQQYNRYPYTFGQGTKLEIKGTEGKSSGSGSESKSTQVQLVQSGAEVKKPGASVKVSCKASGYSFTGYTMNWVRQAPGQGLEWMGLINPYNSDTNYAQKLQGRVTMTTDTSTSTAYMELRSLRSDDTAVYYCARVALRVALDYWGQGTLVTVSS

SEQ ID NO: 628 - protein, 246 aa, Artificial Sequence
  Synthetic
EVQLVQSGAEVKKPGESLKISCKGSGYSFTSYFIGWVRQMPGKGLEWMGIIYPGKSDTRYSPSFQGQVTISADKSISTAYLQWSSLKASDTAMYYCARVYSFGGRHKALFDYWGQGTLVTVSSGTEGKSSGSGSESKSTEIVLTQSPATLSLSPGERATLSCRASQSVSSYLAWYQQKPGQAPRLLIYDASNRATGIPARFSGSGSGTDFTLTISSLEPEDFAVYYCQQRSNWPLTFGQGTKVEIK

SEQ ID NO: 629 - protein, 243 aa, Artificial Sequence
  Synthetic
QVQLVQSGAEVKKPGSSVKVSCKASGGTFSSYAISWVRQAPGQGLEWMGGIIPIFGTANYAQKFQGRVTITADESTSTAYMELSSLRSEDTAVYYCARESRWRGYKLDYWGQGTLVTVSSGTEGKSSGSGSESKSTDIQMTQSPSSLSASVGDRVTITCRASQSISSYLNWYQQKPGKAPKLLIYAASSLQSGVPSRFSGSGSGTDFTLTISSLQPEDFATYYCQQSYSTPLTFGQGTKVEIK

SEQ ID NO: 630 - protein, 241 aa, Artificial Sequence
  Synthetic
QVQLVQSGAEVKKPGASVKVSCKASGYSFTGYTMNWVRQAPGQGLEWMGLINPYNSDTNYAQKLQGRVTMTTDTSTSTAYMELRSLRSDDTAVYYCARVALRVALDYWGQGTLVTVSSGTEGKSSGSGSESKSTDIQMTQSPSSLSASVGDRVTITCKASQNVATHVGWYQQKPGKAPKRLIYSASYRYSGVPSRFSGSGSGTEFTLTISNLQPEDFATYYCQQYNRYPYTFGQGTKLEIK

SEQ ID NO: 631 - protein, 707 aa, Artificial Sequence
  Synthetic
KSSNEATNITPKHNMKAFLDELKAENIKKFLYNFTQIPHLAGTEQNFQLAKQIQSQWKEFGLDSVELAHYDVLLSYPNKTHPNYISIINEDGNEIFNTSLFEPPPPGYENVSDIVPPFSAFSPQGMPEGDLVYVNYARTEDFFKLERDMKINCSGKIVIARYGKVFRGNKVKNAQLAGAKGVILYSDPADYFAPGVKSYPDGWNLPGGGVQRGNILNLNGAGDPLTPGYPANEYAYRRGIAEAVGLPSIPVHPIGYYDAQKLLEKMGGSAPPDSSWRGSLKVPYNVGPGFTGNFSTQKVKMHIHSTNEVTRIYNVIGTLRGAVEPDRYVILGGHRDSWVFGGIDPQSGAAVVHEIVRSFGTLKKEGWRPRRTILFASWDAEEFGLLGSTEWAEENSRLLQERGVAYINADSSIEGNYTLRVDCTPLMYSLVHNLTKELKSPDEGFEGKSLYESWTKKSPSPEFSGMPRISKLGSGNDFEVFFQRLGIASGRARYTKNWETNKFSGYPLYHSVYETYELVEKFYDPMFKYHLTVAQVRGGMVFELANSIVLPFDCRDYAVVLRKYADKIYSISMKHPQEMKTYSVSFDSLFSAVKNFTEIASKFSERLQDFDKSNPIVLRMMNDQLMFLERAFIDPLGLPDRPFYRHVIYAPSSHNKYAGESFPGIYDALFDIESKVDPSKAWGEVKRQIYVAAFTVQAAAETLSEVA

SEQ ID NO: 632 - protein, 254 aa, Artificial Sequence
  Synthetic
QSVLTQPPSVSGAPGQRVTISCTGSSSNIGAGYDVHWYQQLPGTAPKLLIYGNSNRPSGVPDRFSGSKSGTSASLAITGLQAEDEADYYCQSYDSSLSGYVFGTGTKVTVLGSRGGGGSGGGGSGGGGSLEMAEVQLVQSGAEVKKPGESLKISCKGSGYSFTSYWIGWVRQMPGKGLEWMGIIYPGDSDTRYSPSFQGQVTISADKSISTAYLQWSSLKASDTAMYYCARSMGSSLYASSDVWGQGTLVTVSS

SEQ ID NO: 633 - protein, 249 aa, Artificial Sequence
  Synthetic
QAVLTQPPSASGTPGQRVTISCSGSSSNIGSNTVNWYQQLPGTAPKLLMYSNNQRPSGVPDRFSGSKSGTSASLAISGLQSEDEADYYCAAWDDSLNGYVFGTGTKVTVLGSRGGGGSGGGGSGGGGSLEMAEVQLVQSGAEMKKPGESLKISCKGSGYNFASYWVGWVRQMPGKGLEWMGTIYPDDSDTRYGPAFQGQVTISADKSISTAYLQWSSLKASDTAMYYCARDSYYGIDVWGQGTLVTVSS

SEQ ID NO: 634 - protein, 132 aa, Artificial Sequence
  Synthetic
MSPAQFLFLLVLWIQETNGDVVMTQTPLTLSVTIGQPASISCKSSQSLLYSNGKTYLNWLLQRPGQSPKRLIYLVSKLDSGVPDRFTGSGSGTDFTLKISRVEAEDLGVYYCVQGTHFPHTFGGGTKLEIKR

SEQ ID NO: 635 - protein, 133 aa, Artificial Sequence
  Synthetic
MNFGLSLIFLVLVLKGVQCEVKVVESGGGLVKPGASLKLSCAASGFTFSNYGMSWVRQTSDKRLEWVASISSGGDSTFYADNVKGRFTISRENAKNTLYLQMSSLKSEDTALYYCARDDLFNWGQGTTLTVSS

SEQ ID NO: 636 - protein, 5 aa, Artificial Sequence
  Synthetic
SYYMH

SEQ ID NO: 637 - protein, 17 aa, Artificial Sequence
  Synthetic
IINPSGGSTSYAQKFQG

SEQ ID NO: 638 - protein, 10 aa, Artificial Sequence
  Synthetic
GVGAHDAFDI

SEQ ID NO: 639 - protein, 9 aa, Artificial Sequence
  Synthetic
VVAAAVADY

SEQ ID NO: 640 - protein, 16 aa, Artificial Sequence
  Synthetic
RSSQSLLHSNGNNYLD

SEQ ID NO: 641 - protein, 16 aa, Artificial Sequence
  Synthetic
RSSQSLLHSNGYNYLD

SEQ ID NO: 642 - protein, 7 aa, Artificial Sequence
  Synthetic
LGSNRAS

SEQ ID NO: 643 - protein, 9 aa, Artificial Sequence
  Synthetic
MQGTHPAIS

SEQ ID NO: 644 - protein, 9 aa, Artificial Sequence
  Synthetic
MQSLQTPFT

SEQ ID NO: 645 - protein, 112 aa, Artificial Sequence
  Synthetic
DVVMTQSPLSLPVTPGEPASISCRSSQSLLHSNGNNYLDWYLQKPGQSPQLLIYLGSNRASGVPDRFSGSGSDTDFTLQISRVEAEDVGVYYCMQGTHPAISFGQGTRLEIK

SEQ ID NO: 646 - protein, 119 aa, Artificial Sequence
  Synthetic
EVQLVQSGAEVKKPGASVKVSCKASGYTFTSYYMHWVRQAPGQGLEWMGIINPSGGSTSYAQKFQGRVTMTRDTSTSTVYMELSSLRSEDTAVYYCARGVGAHDAFDIWGQGTTVTVSS

SEQ ID NO: 647 - protein, 107 aa, Artificial Sequence
  Synthetic
DIQMTQSPSSLSASVGDRVTITCRASQDISNYLNWYQQKPGKAPKLLIYYTSRLHSGVPSRFSGSGSGTDFTFTISSLQPEDIATYYCQQYSKLPRTFGGGTKVEIK

SEQ ID NO: 648 - protein, 110 aa, Artificial Sequence
  Synthetic
DIVMTQSPDSLAVSLGERATINCRASKSVSTSGYSYMHWYQQKPGQPPKLLIYLASNLESGVPDRFSGSGSGTDFTLTISSLQAEDVAVYYCQHIRELPYTFGGGTKVEI

SEQ ID NO: 649 - protein, 111 aa, Artificial Sequence
  Synthetic
DIQMTQSPSSLSASVGDRVTITCRASKSVSTSGYSYMHWYQQKPGKAPKLLIYLASNLESGVPSRFSGSGSGTDFTFTISSLQPEDIATYYCQHIRELPYTFGGGTKVEIK

SEQ ID NO: 650 - protein, 107 aa, Artificial Sequence
  Synthetic
DIQMTQSPSSVSASVGDRVTITCKASQDVSTSVAWYQQKPGKAPKLLIYSASYRYTGVPSRFSGSGSGTDFTLTISSLQPEDFATYYCQQHYNTPPTFGGGTKVEIK

SEQ ID NO: 651 - protein, 113 aa, Artificial Sequence
  Synthetic
DIQMTQSPSSLSASVGDRVTITCKSSQSLLNSRNQKNYLAWYQQKPGKVPKLLIYFASTRESGVPSRFSGSGSGTDFTLTISSLQPEDVATYFCQQHYITPYTFGGGTKVEIK

SEQ ID NO: 652 - protein, 121 aa, Artificial Sequence
  Synthetic
QVQLVQSGAEVKKPGASVKVSCKASGYTFTSYWMHWVRQAPGQRLEWMGNIYPGSGITHYNEKFKSRVTITRDTSASTAYMELSSLRSEDTAVYYCTRGGYGKGDWYFDVWGQGTTVTVSS

SEQ ID NO: 653 - protein, 117 aa, Artificial Sequence
  Synthetic
EVQLVQSGAEVKKPGESLKISCKGSGYSFTSYPMHWVRQMPGKGLEWMGWIKMYSGVPTYADDFKGQVTISLDKSISTAYLQWSSLKASDTAMYYCARNWDKGFDYWGQGTTVTVSS

SEQ ID NO: 654 - protein, 122 aa, Artificial Sequence
  Synthetic
QVQLVQSGAEVKKPGASVKVSCKASGYTFTSYGLAWVRQAPGQGLEWMGYIFPGNDYTAYNEKFQGRVTMTTDTSTSTAYMELRSLRSDDTAVYYCAREGQLGLHYYFMDYWGQGTLVTVSS

SEQ ID NO: 655 - protein, 119 aa, Artificial Sequence
  Synthetic
QVQLVQSGAEVKKPGASVKVSCKASGYTFTDYYMNWVRQAPGQGLEWMGDINPYYGSSNYNQKFKGRVTMTTDKSTSTAYMELRSLRSDDTAVYYCARDSSGYVGFAYWGQGTLVTVSS

SEQ ID NO: 656 - protein, 113 aa, Artificial Sequence; identical to SEQ ID NO: 651
  Synthetic

SEQ ID NO: 657 - protein, 111 aa, Artificial Sequence
  Synthetic
QSALTQPASVSGSPGQSITISCTGTSSDVGGYNYVSWYQQHPGKAPKVMIYDVTNRPSGVSNRFSGSKSGNTASLTISGLQAEDEADYYCSSYTIASTLVVFGGGTKLTVL

SEQ ID NO: 658 - protein, 112 aa, Artificial Sequence
  Synthetic
QSALTQPASVSGSPGQSITISCTGTSSDVGGYNYVSWYQQHPGKAPKVMIYDVTNRPSGVSNRFSGSKSGNTASLTISGLQAEDEADYYCSSYTSTSTFVVFGGGTKLTVLG

SEQ ID NO: 659 - protein, 111 aa, Artificial Sequence
  Synthetic
QSALTQPASVSGSPGQSITISCTGTSSDVGGYNYVSWYQQHPGKAPKVMIYDVTNRPSGVSNRFSGSKSGNTASLTISGLQAEDEADYYCSSYTRTSTLVVFGGGTKLTVL

SEQ ID NO: 660 - protein, 120 aa, Artificial Sequence
  Synthetic
QVQLQQSGGGLVKPGGSLRLSCAASGFTFSSYDMHWVRQAPGKGLEWVAVISYDGSNKYYADSVKGRFTISRDNSKNTLYLQMDSLRAEDTAVYFCAKEGDSSRWSYDLWGRGTLVTVSS

SEQ ID NO: 661 - protein, 120 aa, Artificial Sequence
  Synthetic
QVQLQQSGGGLVKPGGSLRLSCAASGFTFSSYAMHWVRQAPGKGLEWVAVISYDGSNKYYADSVKGRFTISRDNSKNTLYLQMDSLRAEDTAVYYCAKEGDSSRWSYDLWGRGTLVTVSS

SEQ ID NO: 662 - protein, 120 aa, Artificial Sequence; identical to SEQ ID NO: 660
  Synthetic

SEQ ID NO: 663 - protein, 108 aa, Artificial Sequence
  Synthetic
DTVMTQSPASLSTSVGERVTVNCKASQHVHAAVAWFQQKPGQSPRRLIYLATSRHTGVPDRFTGSGFGRDFTLTISNVEAEDLAVYYCLQYGSIPFAFGSGTKLELIR

SEQ ID NO: 664 - protein, 108 aa, Artificial Sequence
  Synthetic
DTVMTQSPASMSTSVGERVTVNCKASQHVTAVVAWFQQKPGQSPKRLIYLSTYRHTGVPNRFTGSGFGRDFTLTISNVEAEDLAVYYCLQYGSIPFTFGSGTRLEIKR

SEQ ID NO: 665 - protein, 119 aa, Artificial Sequence
  Synthetic
EVQLVESGGGLVQPGRSLRVSCAASGFTFSIYGMAWVRQAPTKGLEWVASIINSGGSTYYRDSVRGRFTISRDNAKSTLYLQMDSLRSEDTATYYCTTVDGSHYFDYWGRGVMVTVSSA

SEQ ID NO: 666 - protein, 118 aa, Artificial Sequence
  Synthetic
EVQLTESGGGLVPPGRSLKLSCEASGFIFSDYGMAWVRQGPTKGLEWVASITNSGGNTFYRDSVKGRFTISRDNAKRTLYLQMDSLRSEDTATYYCTTVDGSHYFDYWGQGVMVTVSS

SEQ ID NO: 667 - protein, 130 aa, Artificial Sequence
  Synthetic
MHFQVQIFSFLLISASVIMSRGDIQLTQSPSSLSASVGDRVTITCTASSTVSSTYLHWYQQKPGKAPKLLIYSTSNLASGVPSRFSGSGSGTDYTLTISSLQPEDFATYYCHQYHRSPPTFGQGTKLEIK

SEQ ID NO: 668 - protein, 123 aa, Artificial Sequence
  Synthetic
EVQLVQSGAEVKKPGASVKISCKASGYTFTDYYMNWVRQAPGQGLEWMGDVVPNNGVPTYNQKFKGRVTITADKSTSTAYMELRSLRSEDTAVYYCARPHYYYAGRSGAMDYWGQGTLVTVSS

SEQ ID NO: 669 - protein, 106 aa, Artificial Sequence
  Synthetic
IVLTQSPAIMSASPGEKVTITCSASSSVSYLHWFQQKPGTSPKLWVYSTSNLPSGVPARFGGSGSGTSYSLTISRMEAEDAATYYCQQRSIYPPWTFGGGTKLEIK

SEQ ID NO: 670 - protein, 106 aa, Artificial Sequence
  Synthetic
IVLTQSPSIMSVSPGEKVTITCSASSSVSYMHWFQQKPGTSPKLCIYSTSNLASGVPARFSGRGSGTSYSLTISRVAAEDAATYYCQQRSNYPPWTFGGGTKLEIK

SEQ ID NO: 671 - protein, 106 aa, Artificial Sequence
  Synthetic
IVLTQSPAIMSASPGEKVTITCSASSSVSYMHWFQQKPGTSPKLWIYSTSNLASGVPARFSGSGSGTSYSLTISRVAAEDAATYYCQQRSTYPPWTFGGGTKLEIK

SEQ ID NO: 672 - protein, 106 aa, Artificial Sequence
  Synthetic
IVLTQSPAIMSASPGEKVTITCSASSSVNYMHWFQLKPGTSPKLLIYSTSNLASGVPARFSGRGSGTSYSLTISRMEAEDAATYYCQQRNNYPPWTFGGGTKLEIK

SEQ ID NO: 673 - protein, 106 aa, Artificial Sequence
  Synthetic
IVLTQSPSIMSVSPGEKVTITCSASSSVSYMHWFQQKPGTSPKLGIYSTSNLASGVPARFSGRGSGTSYSLTISRVAAEDAATYYCQQRSNYPPWTFGGGTKLEIK

SEQ ID NO: 674 - protein, 106 aa, Artificial Sequence
  Synthetic
IVLTQSPSIMSVSPGEKVTITCSASSSVSYMHWFQQKPGTSPKLSIYSTSNLASGVPARFSGRGSGTSYSLTISRVAAEDAATYYCQQRSNYPPWTFGGGTKLEIK

SEQ ID NO: 675 - protein, 107 aa, Artificial Sequence
  Synthetic
DIVLTQSPSIMSVSPGEKVTITCSASSSVSYMHWFQQKPGTSPKLLIYSTSNLASGVPARFSGRGSGTSYSLTISRVAAEDAATYYCQQRSNYPPWTFGGGTKLEIK

SEQ ID NO: 676 - protein, 106 aa, Artificial Sequence
  Synthetic
IVLTQSPSIMSVSPGEKVTITCSASSSVSYMHWFQQKPGTSPKLLIYSTSNLASGVPARFSGRGSGTSYSLTISRVAAEDAATYYCQQRSNYPPWTFGGGTKLEIK

SEQ ID NO: 677 - protein, 106 aa, Artificial Sequence
  Synthetic
IVLTQSPSIMSVSPGEKVTITCSASSSVSYMHWFQQKPGTSPKLWIYSTSNLASGVPARFSGRGSGTSYSLTISRVAAEDAATYYCQQRSNYPPWTFGGGTKLEIK

SEQ ID NO: 678 - protein, 106 aa, Artificial Sequence; identical to SEQ ID NO: 674
  Synthetic

SEQ ID NO: 679 - protein, 117 aa, Artificial Sequence
  Synthetic
EVQLQQSGPELVKPGASMKISCKASGYSFTGYTMNWVKQSHGKNLEWIGLINPYNGGTSYNQKFKGKATLTIDKSSSTAYMELLSLTSEDSAVYYCARDYGYVLDYWGQGTTLTVSS

SEQ ID NO: 680 - protein, 117 aa, Artificial Sequence; identical to SEQ ID NO: 88
  Synthetic

SEQ ID NO: 681 - protein, 117 aa, Artificial Sequence
  Synthetic
EVQLQQSGPELVKPGASMKISCKASGYSFTGYTMNWVKQSHGKNLEWIGLINPYNGGIIYNQKFKGKATLTVDKSSSTAYMELLSLTSEDSAVFYCARDFGYVLDYWGQGTTLTVSS

SEQ ID NO: 682 - protein, 117 aa, Artificial Sequence
  Synthetic
EVQLQQSRPELVKPGASMKISCKASGYSFTGYTLNWVKQSHGKNLEWIGLINPYNGGSSYNQKFKDKATLTVDKSSSTAYMELLSLTSEDSAVYYCARDYGYVFDYWGQGTTLTVSS

SEQ ID NO: 683 - protein, 791 aa, Artificial Sequence
  Synthetic
MALPVTALLLPLALLLHAARPDYKDDDDKGGGGSGGGGSSRSVALAVLALLSLSGLEAVMAPRTLFLGGGGSGGGGSGGGGSIQRTPKIQVYSRHPAENGKSNFLNCYVSGFHPSDIEVDLLKNGERIEKVEHSDLSFSKDWSFYLLYYTEFTPTEKDEYACRVNHVTLSQPKIVKWDRDMGGGGSGGGGSGGGGSGGGGSGSMHVLRYGYTGIFDDTSHMTLTVVGIFDGQHFFTYHVNSSDKASSRANGTISWMANVSAAYPTYLDGERAKGDLIFNQTEQNLLELEIALGYRSQSVLTWTHECNTTENGSFVAGYEGFGWDGETLMELKDNLTLWTGPNYEISWLKQNKTYIDGKIKNISEGDTTIQRNYLKGNCTQWSVIYSGFQTPVTHPVVKGGVRNQNDNRAEAFCTSYGFFPGEINITFIHYGNKAPDDSEPQCNPLLPTFDGTFHQGCYVAIFCNQNYTCRVTHGNWTVEIPISVTSPDDSSSGEVPDHPTANKRYNTMTISSVLLALLLCALLFAFLHYFTTLKQYLRNLAFAWRYRKVRSSMVSKGEELFTGVVPILVELDGDVNGHKFSVSGEGEGDATYGKLTLKFICTTGKLPVPWPTLVTTLTYGVQCFSRYPDHMKQHDFFKSAMPEGYVQERTIFFKDDGNYKTRAEVKFEGDTLVNRIELKGIDFKEDGNILGHKLEYNYNSHNVYIMADKQKNGIKVNFKIRHNIEDGSVQLADHYQQNTPIGDGPVLLPDNHYLSTQSALSKDPNEKRDHMVLLEFVTAAGITLGMDELYK

SEQ ID NO: 684 - DNA, 2931 bp, Artificial Sequence
  UL18 trimer_SS VMAPRTLFL_IRES_GFP
atggcactccccgtaactgctctgctgctgccgttggcattgctcctgcacgccgcacgcccggactacaaagacgatgacgataaaggcggtggtggctctggtggtggcggatcctctcgctccgtggccttagctgtgctcgcgctactctctcttagcggcctcgaagctgttatggctccgcggactttattcttaggtggtggcggatccggtggtggcggttctggtggtggcggctccatccagcgtacgcccaaaattcaagtctacagccgacatcctgcagagaacggcaaatctaatttcctgaactgctatgtatcaggctttcaccctagcgatatagaagtggacctgctgaaaaacggagagaggatagaaaaggtcgaacacagcgacctctccttttccaaggactggagcttttatcttctgtattatactgaatttacacccacggaaaaagatgagtatgcgtgccgagtaaaccacgtcacgctgtcacagcccaaaatagtaaaatgggatcgcgacatgggtggtggcggttctggtggtggcggtagtggcggcggaggaagcggtggtggcggttccggatctatgcacgtgctgagatacggatataccggcatcttcgacgatacatcccatatgactctgaccgtggtcgggatttttgacggacagcacttctttacataccatgtgaacagctccgataaggcttctagtcgagcaaatggcaccatctcatggatggccaacgtgagcgcagcctaccccacatatctggacggagaacgcgctaaaggcgatctgatcttcaatcagaccgagcagaacctgctggagctggaaattgctctggggtacaggtctcagagtgtcctgacatggactcacgaatgtaataccacagagaacgggagcttcgtggcaggatatgagggctttgggtgggacggagaaacactgatggagctgaaggataatctgactctgtggaccggccctaactacgaaatcagctggctgaagcagaacaagacttacatcgacggaaagatcaaaaacatcagcgagggcgatactaccatccagcgcaattacctgaagggcaactgcacccagtggagcgtgatctactctgggttccagacacctgtcactcacccagtggtcaaagggggagtgcgaaaccagaatgacaaccgggccgaggccttctgtacatcctacggcttctttcccggggagatcaatattacttttatccattacggcaacaaggcccccgacgattctgagcctcagtgcaatcccctgctgcctaccttcgatggcacatttcaccaggggtgctacgtcgctatcttctgcaatcagaactatacttgccgggtgacccatgggaactggactgtggaaatcccaatttcagtcaccagccccgacgattcaagctccggagaggtgccagatcaccccaccgcaaataagagatacaacaccatgacaatctctagtgtgctgctggccctgctgctgtgcgcactgctgttcgcttttctgcattacttcacaactctgaagcagtatctgcggaacctggcatttgcctggcggtacagaaaagtgagatcaagctgaacgttactggccgaagccgcttggaataaggccggtgtgcgtttgtctatatgttattttccaccatattgccgtcttttggcaatgtgagggcccggaaacctggccctgtcttcttgacgagcattcctaggggtctttcccctctcgccaaaggaatgcaaggtctgttgaatgtcgtgaaggaagcagttcctctggaagcttcttgaagacaaacaacgtctgtagcgaccctttgcaggcagcggaaccccccacctggcgacaggtgcctctgcggccaaaagccacgtgtataagatacacctgcaaaggcggcacaaccccagtgccacgttgtgagttggatagttgtggaaagagtcaaatggctctcctcaagcgtattcaacaaggggctgaaggatgcccagaaggtaccccattgtatgggatctgatctggggcctcggtgcacatgctttacatgtgtttagtcgaggttaaaaaaacgtctaggccccccgaaccacggggacgtggttttcctttgaaaaacacgataataccatggtgagcaagggcgaggagctgttcaccggggtggtgcccatcctggtcgagctggacggcgacgtaaacggccacaagttcagcgtgtccggcgagggcgagggcgatgccacctacggcaagctgaccctgaagttcatctgcaccaccggcaagctgcccgtgccctggcccaccctcgtgaccaccctgacctacggcgtgcagtgcttcagccgctaccccgaccacatgaagcagcacgacttcttcaagtccgccatgcccgaaggctacgtccaggagcgcaccatcttcttcaaggacgacggcaactacaagacccgcgccgaggtgaagttcgagggcgacaccctggtgaaccgcatcgagctgaagggcatcgacttcaaggaggacggcaacatcctggggcacaagctggagtacaactacaacagccacaacgtctatatcatggccgacaagcagaagaacggcatcaaggtgaacttcaagatccgccacaacatcgaggacggcagcgtgcagctcgccgaccactaccagcagaacacccccatcggcgacggccccgtgctgctgcccgacaaccactacctgagcacccagtccgccctgagcaaagaccccaacgagaagcgcgatcacatggtcctgctggagttcgtgaccgccgccgggatcactctcggcatggacgagctgtacaagtaa

SEQ ID NO: 685 - protein, 514 aa, Artificial Sequence
  UL18 trimer_SS VMAPRTLFL - AA [no Flag or GFP]
MSRSVALAVLALLSLSGLEAVMAPRTLFLGGGGSGGGGSGGGGSIQRTPKIQVYSRHPAENGKSNFLNCYVSGFHPSDIEVDLLKNGERIEKVEHSDLSFSKDWSFYLLYYTEFTPTEKDEYACRVNHVTLSQPKIVKWDRDMGGGGSGGGGSGGGGSGGGGSGSMHVLRYGYTGIFDDTSHMTLTVVGIFDGQHFFTYHVNSSDKASSRANGTISWMANVSAAYPTYLDGERAKGDLIFNQTEQNLLELEIALGYRSQSVLTWTHECNTTENGSFVAGYEGFGWDGETLMELKDNLTLWTGPNYEISWLKQNKTYIDGKIKNISEGDTTIQRNYLKGNCTQWSVIYSGFQTPVTHPVVKGGVRNQNDNRAEAFCTSYGFFPGEINITFIHYGNKAPDDSEPQCNPLLPTFDGTFHQGCYVAIFCNQNYTCRVTHGNWTVEIPISVTSPDDSSSGEVPDHPTANKRYNTMTISSVLLALLLCALLFAFLHYFTTLKQYLRNLAFAWRYRKVRSS

SEQ ID NO: 686 - DNA, 1545 bp, Artificial Sequence
  UL18 trimer_SS VMAPRTLFL -  NT [no Flag or GFP]
atgtctcgctccgtggccttagctgtgctcgcgctactctctcttagcggcctcgaagctgttatggctccgcggactttattcttaggtggtggcggatccggtggtggcggttctggtggtggcggctccatccagcgtacgcccaaaattcaagtctacagccgacatcctgcagagaacggcaaatctaatttcctgaactgctatgtatcaggctttcaccctagcgatatagaagtggacctgctgaaaaacggagagaggatagaaaaggtcgaacacagcgacctctccttttccaaggactggagcttttatcttctgtattatactgaatttacacccacggaaaaagatgagtatgcgtgccgagtaaaccacgtcacgctgtcacagcccaaaatagtaaaatgggatcgcgacatgggtggtggcggttctggtggtggcggtagtggcggcggaggaagcggtggtggcggttccggatctatgcacgtgctgagatacggatataccggcatcttcgacgatacatcccatatgactctgaccgtggtcgggatttttgacggacagcacttctttacataccatgtgaacagctccgataaggcttctagtcgagcaaatggcaccatctcatggatggccaacgtgagcgcagcctaccccacatatctggacggagaacgcgctaaaggcgatctgatcttcaatcagaccgagcagaacctgctggagctggaaattgctctggggtacaggtctcagagtgtcctgacatggactcacgaatgtaataccacagagaacgggagcttcgtggcaggatatgagggctttgggtgggacggagaaacactgatggagctgaaggataatctgactctgtggaccggccctaactacgaaatcagctggctgaagcagaacaagacttacatcgacggaaagatcaaaaacatcagcgagggcgatactaccatccagcgcaattacctgaagggcaactgcacccagtggagcgtgatctactctgggttccagacacctgtcactcacccagtggtcaaagggggagtgcgaaaccagaatgacaaccgggccgaggccttctgtacatcctacggcttctttcccggggagatcaatattacttttatccattacggcaacaaggcccccgacgattctgagcctcagtgcaatcccctgctgcctaccttcgatggcacatttcaccaggggtgctacgtcgctatcttctgcaatcagaactatacttgccgggtgacccatgggaactggactgtggaaatcccaatttcagtcaccagccccgacgattcaagctccggagaggtgccagatcaccccaccgcaaataagagatacaacaccatgacaatctctagtgtgctgctggccctgctgctgtgcgcactgctgttcgcttttctgcattacttcacaactctgaagcagtatctgcggaacctggcatttgcctggcggtacagaaaagtgagatcaagctga

SEQ ID NO: 687 - protein, 777 aa, Artificial Sequence
  HLA-E trimer_SS VMAPRTLFL_IRES_GFP
MALPVTALLLPLALLLHAARPDYKDDDDKGGGGSGGGGSSRSVALAVLALLSLSGLEAVMAPRTLFLGGGGSGGGGSGGGGSIQRTPKIQVYSRHPAENGKSNFLNCYVSGFHPSDIEVDLLKNGERIEKVEHSDLSFSKDWSFYLLYYTEFTPTEKDEYACRVNHVTLSQPKIVKWDRDMGGGGSGGGGSGGGGSGGGGSGSHSLKYFHTSVSRPGRGEPRFISVGYVDDTQFVRFDNDAASPRMVPRAPWMEQEGSEYWDRETRSARDTAQIFRVNLRTLRGYYNQSEAGSHTLQWMHGCELGPDRRFLRGYEQFAYDGKDYLTLNEDLRSWTAVDTAAQISEQKSNDASEAEHQRAYLEDTCVEWLHKYLEKGKETLLHLEPPKTHVTHHPISDHEATLRCWALGFYPAEITLTWQQDGEGHTQDTELVETRPAGDGTFQKWAAVVVPSGEEQRYTCHVQHEGLPEPVTLRWKPASQPTIPIVGIIAGLVLLGSVVSGAVVAAVIWRKKSSGGKGGSYYKAEWSDSAQGSESHSLMVSKGEELFTGVVPILVELDGDVNGHKFSVSGEGEGDATYGKLTLKFICTTGKLPVPWPTLVTTLTYGVQCFSRYPDHMKQHDFFKSAMPEGYVQERTIFFKDDGNYKTRAEVKFEGDTLVNRIELKGIDFKEDGNILGHKLEYNYNSHNVYIMADKQKNGIKVNFKIRHNIEDGSVQLADHYQQNTPIGDGPVLLPDNHYLSTQSALSKDPNEKRDHMVLLEFVTAAGITLGMDELYK

SEQ ID NO: 688 - DNA, 2889 bp, Artificial Sequence
  HLA-E trimer_SS VMAPRTLFL
atggcactccccgtaactgctctgctgctgccgttggcattgctcctgcacgccgcacgcccggactacaaagacgatgacgataaaggcggtggtggctctggtggtggcggatcctctcgctccgtggccttagctgtgctcgcgctactctctcttagcggcctcgaagctgttatggctccgcggactttattcttaggtggtggcggatccggtggtggcggttctggtggtggcggctccatccagcgtacgcccaaaattcaagtctacagccgacatcctgcagagaacggcaaatctaatttcctgaactgctatgtatcaggctttcaccctagcgatatagaagtggacctgctgaaaaacggagagaggatagaaaaggtcgaacacagcgacctctccttttccaaggactggagcttttatcttctgtattatactgaatttacacccacggaaaaagatgagtatgcgtgccgagtaaaccacgtcacgctgtcacagcccaaaatagtaaaatgggatcgcgacatgggtggtggcggttctggtggtggcggtagtggcggcggaggaagcggtggtggcggttccggatctcactccttgaagtatttccacacttccgtgtcccggcccggccgcggggagccccgcttcatctctgtgggctacgtggacgacacccagttcgtgcgcttcgacaacgacgccgcgagtccgaggatggtgccgcgggcgccgtggatggagcaggaggggtcagagtattgggaccgggagacacggagcgccagggacaccgcacagattttccgagtgaacctgcggacgctgcgcggctactacaatcagagcgaggccgggtctcacaccctgcagtggatgcatggctgcgagctggggcccgacaggcgcttcctccgcgggtatgaacagttcgcctacgacggcaaggattatctcaccctgaatgaggacctgcgctcctggaccgcggtggacacggcggctcagatctccgagcaaaagtcaaatgatgcctctgaggcggagcaccagagagcctacctggaagacacatgcgtggagtggctccacaaatacctggagaaggggaaggagacgctgcttcacctggagcccccaaagacacacgtgactcaccaccccatctctgaccatgaggccaccctgaggtgctgggctctgggcttctaccctgcggagatcacactgacctggcagcaggatggggagggccatacccaggacacggagctcgtggagaccaggcctgcaggggatggaaccttccagaagtgggcagctgtggtggtgccttctggagaggagcagagatacacgtgccatgtgcagcatgaggggctacccgagcccgtcaccctgagatggaagccggcttcccagcccaccatccccatcgtgggcatcattgctggcctggttctccttggatctgtggtctctggagctgtggttgctgctgtgatatggaggaagaagagctcaggtggaaaaggagggagctactataaggctgagtggagcgacagtgcccaggggtctgagtctcacagcttgtaaacgttactggccgaagccgcttggaataaggccggtgtgcgtttgtctatatgttattttccaccatattgccgtcttttggcaatgtgagggcccggaaacctggccctgtcttcttgacgagcattcctaggggtctttcccctctcgccaaaggaatgcaaggtctgttgaatgtcgtgaaggaagcagttcctctggaagcttcttgaagacaaacaacgtctgtagcgaccctttgcaggcagcggaaccccccacctggcgacaggtgcctctgcggccaaaagccacgtgtataagatacacctgcaaaggcggcacaaccccagtgccacgttgtgagttggatagttgtggaaagagtcaaatggctctcctcaagcgtattcaacaaggggctgaaggatgcccagaaggtaccccattgtatgggatctgatctggggcctcggtgcacatgctttacatgtgtttagtcgaggttaaaaaaacgtctaggccccccgaaccacggggacgtggttttcctttgaaaaacacgataataccatggtgagcaagggcgaggagctgttcaccggggtggtgcccatcctggtcgagctggacggcgacgtaaacggccacaagttcagcgtgtccggcgagggcgagggcgatgccacctacggcaagctgaccctgaagttcatctgcaccaccggcaagctgcccgtgccctggcccaccctcgtgaccaccctgacctacggcgtgcagtgcttcagccgctaccccgaccacatgaagcagcacgacttcttcaagtccgccatgcccgaaggctacgtccaggagcgcaccatcttcttcaaggacgacggcaactacaagacccgcgccgaggtgaagttcgagggcgacaccctggtgaaccgcatcgagctgaagggcatcgacttcaaggaggacggcaacatcctggggcacaagctggagtacaactacaacagccacaacgtctatatcatggccgacaagcagaagaacggcatcaaggtgaacttcaagatccgccacaacatcgaggacggcagcgtgcagctcgccgaccactaccagcagaacacccccatcggcgacggccccgtgctgctgcccgacaaccactacctgagcacccagtccgccctgagcaaagaccccaacgagaagcgcgatcacatggtcctgctggagttcgtgaccgccgccgggatcactctcggcatggacgagctgtacaagtaa

SEQ ID NO: 689 - protein, 500 aa, Artificial Sequence
  HLA-E trimer_SS VMAPRTLFL - AA - [no flag or gfp]
MSRSVALAVLALLSLSGLEAVMAPRTLFLGGGGSGGGGSGGGGSIQRTPKIQVYSRHPAENGKSNFLNCYVSGFHPSDIEVDLLKNGERIEKVEHSDLSFSKDWSFYLLYYTEFTPTEKDEYACRVNHVTLSQPKIVKWDRDMGGGGSGGGGSGGGGSGGGGSGSHSLKYFHTSVSRPGRGEPRFISVGYVDDTQFVRFDNDAASPRMVPRAPWMEQEGSEYWDRETRSARDTAQIFRVNLRTLRGYYNQSEAGSHTLQWMHGCELGPDRRFLRGYEQFAYDGKDYLTLNEDLRSWTAVDTAAQISEQKSNDASEAEHQRAYLEDTCVEWLHKYLEKGKETLLHLEPPKTHVTHHPISDHEATLRCWALGFYPAEITLTWQQDGEGHTQDTELVETRPAGDGTFQKWAAVVVPSGEEQRYTCHVQHEGLPEPVTLRWKPASQPTIPIVGIIAGLVLLGSVVSGAVVAAVIWRKKSSGGKGGSYYKAEWSDSAQGSESHSL

SEQ ID NO: 690 - DNA, 1503 bp, Artificial Sequence
  HLA-E trimer_SS VMAPRTLFL [no flag or gfp]
atgtctcgctccgtggccttagctgtgctcgcgctactctctcttagcggcctcgaagctgttatggctccgcggactttattcttaggtggtggcggatccggtggtggcggttctggtggtggcggctccatccagcgtacgcccaaaattcaagtctacagccgacatcctgcagagaacggcaaatctaatttcctgaactgctatgtatcaggctttcaccctagcgatatagaagtggacctgctgaaaaacggagagaggatagaaaaggtcgaacacagcgacctctccttttccaaggactggagcttttatcttctgtattatactgaatttacacccacggaaaaagatgagtatgcgtgccgagtaaaccacgtcacgctgtcacagcccaaaatagtaaaatgggatcgcgacatgggtggtggcggttctggtggtggcggtagtggcggcggaggaagcggtggtggcggttccggatctcactccttgaagtatttccacacttccgtgtcccggcccggccgcggggagccccgcttcatctctgtgggctacgtggacgacacccagttcgtgcgcttcgacaacgacgccgcgagtccgaggatggtgccgcgggcgccgtggatggagcaggaggggtcagagtattgggaccgggagacacggagcgccagggacaccgcacagattttccgagtgaacctgcggacgctgcgcggctactacaatcagagcgaggccgggtctcacaccctgcagtggatgcatggctgcgagctggggcccgacaggcgcttcctccgcgggtatgaacagttcgcctacgacggcaaggattatctcaccctgaatgaggacctgcgctcctggaccgcggtggacacggcggctcagatctccgagcaaaagtcaaatgatgcctctgaggcggagcaccagagagcctacctggaagacacatgcgtggagtggctccacaaatacctggagaaggggaaggagacgctgcttcacctggagcccccaaagacacacgtgactcaccaccccatctctgaccatgaggccaccctgaggtgctgggctctgggcttctaccctgcggagatcacactgacctggcagcaggatggggagggccatacccaggacacggagctcgtggagaccaggcctgcaggggatggaaccttccagaagtgggcagctgtggtggtgccttctggagaggagcagagatacacgtgccatgtgcagcatgaggggctacccgagcccgtcaccctgagatggaagccggcttcccagcccaccatccccatcgtgggcatcattgctggcctggttctccttggatctgtggtctctggagctgtggttgctgctgtgatatggaggaagaagagctcaggtggaaaaggagggagctactataaggctgagtggagcgacagtgcccaggggtctgagtctcacagcttgtaa

SEQ ID NO: 691 - protein, 364 aa, Artificial Sequence
  CKS17-8aHTM_aa
MALPVTALLLPLALLLHAARPDYKDDDDKGGGGSGGGGSLQNRRGLDLLFLKEGGLTTTPAPRPPTPAPTIASQPLSLRPEACRPAAGGAVHTRGLDFACDIYIWAPLAGTCGVLLLSLVITLYCMVSKGEELFTGVVPILVELDGDVNGHKFSVSGEGEGDATYGKLTLKFICTTGKLPVPWPTLVTTLTYGVQCFSRYPDHMKQHDFFKSAMPEGYVQERTIFFKDDGNYKTRAEVKFEGDTLVNRIELKGIDFKEDGNILGHKLEYNYNSHNVYIMADKQKNGIKVNFKIRHNIEDGSVQLADHYQQNTPIGDGPVLLPDNHYLSTQSALSKDPNEKRDHMVLLEFVTAAGITLGMDELYK

SEQ ID NO: 692 - DNA, 1653 bp, Artificial Sequence
  CKS17-8aHTM
atggcactccccgtaactgctctgctgctgccgttggcattgctcctgcacgccgcacgcccggactacaaagacgatgacgataaaggcggtggtggctctggtggtggcggatccctgcaaaacagaaggggattagacctgctttttcttaaagagggagggctcaccacgacgccagcgccgcgaccaccaacaccggcgcccaccatcgcgtcgcagcccctgtccctgcgcccagaggcgtgccggccagcggcggggggcgcagtgcacacgagggggctggacttcgcctgtgatatctacatctgggcgcccttggccgggacttgtggggtccttctcctgtcactggttatcaccctttactgctgataaacgttactggccgaagccgcttggaataaggccggtgtgcgtttgtctatatgttattttccaccatattgccgtcttttggcaatgtgagggcccggaaacctggccctgtcttcttgacgagcattcctaggggtctttcccctctcgccaaaggaatgcaaggtctgttgaatgtcgtgaaggaagcagttcctctggaagcttcttgaagacaaacaacgtctgtagcgaccctttgcaggcagcggaaccccccacctggcgacaggtgcctctgcggccaaaagccacgtgtataagatacacctgcaaaggcggcacaaccccagtgccacgttgtgagttggatagttgtggaaagagtcaaatggctctcctcaagcgtattcaacaaggggctgaaggatgcccagaaggtaccccattgtatgggatctgatctggggcctcggtgcacatgctttacatgtgtttagtcgaggttaaaaaaacgtctaggccccccgaaccacggggacgtggttttcctttgaaaaacacgataataccatggtgagcaagggcgaggagctgttcaccggggtggtgcccatcctggtcgagctggacggcgacgtaaacggccacaagttcagcgtgtccggcgagggcgagggcgatgccacctacggcaagctgaccctgaagttcatctgcaccaccggcaagctgcccgtgccctggcccaccctcgtgaccaccctgacctacggcgtgcagtgcttcagccgctaccccgaccacatgaagcagcacgacttcttcaagtccgccatgcccgaaggctacgtccaggagcgcaccatcttcttcaaggacgacggcaactacaagacccgcgccgaggtgaagttcgagggcgacaccctggtgaaccgcatcgagctgaagggcatcgacttcaaggaggacggcaacatcctggggcacaagctggagtacaactacaacagccacaacgtctatatcatggccgacaagcagaagaacggcatcaaggtgaacttcaagatccgccacaacatcgaggacggcagcgtgcagctcgccgaccactaccagcagaacacccccatcggcgacggccccgtgctgctgcccgacaaccactacctgagcacccagtccgccctgagcaaagaccccaacgagaagcgcgatcacatggtcctgctggagttcgtgaccgccgccgggatcactctcggcatggacgagctgtacaagtaa

SEQ ID NO: 693 - protein, 107 aa, Artificial Sequence; identical to SEQ ID NO: 218
  CKS17-8aHTM_aa [no flag or gfp]

SEQ ID NO: 694 - DNA, 327 bp, Artificial Sequence
  CKS17-8aHTM [no flag or gfp]
atggcactccccgtaactgctctgctgctgccgttggcattgctcctgcacgccgcacgcccgctgcaaaacagaaggggattagacctgctttttcttaaagagggagggctcaccacgacgccagcgccgcgaccaccaacaccggcgcccaccatcgcgtcgcagcccctgtccctgcgcccagaggcgtgccggccagcggcggggggcgcagtgcacacgagggggctggacttcgcctgtgatatctacatctgggcgcccttggccgggacttgtggggtccttctcctgtcactggttatcaccctttactgctgataa

SEQ ID NO: 695 - protein, 375 aa, Artificial Sequence
  p15E-L-8aHTM_IRES_GFP
MALPVTALLLPLALLLHAARPDYKDDDDKGGGGSGGGGSLQNRRGLDLLFLKEGGLCAALKEECCFYTTTPAPRPPTPAPTIASQPLSLRPEACRPAAGGAVHTRGLDFACDIYIWAPLAGTCGVLLLSLVITLYCMVSKGEELFTGVVPILVELDGDVNGHKFSVSGEGEGDATYGKLTLKFICTTGKLPVPWPTLVTTLTYGVQCFSRYPDHMKQHDFFKSAMPEGYVQERTIFFKDDGNYKTRAEVKFEGDTLVNRIELKGIDFKEDGNILGHKLEYNYNSHNVYIMADKQKNGIKVNFKIRHNIEDGSVQLADHYQQNTPIGDGPVLLPDNHYLSTQSALSKDPNEKRDHMVLLEFVTAAGITLGMDELYK

SEQ ID NO: 696 - DNA, 1686 bp, Artificial Sequence
  p15E-L-8aHTM_IRES_GFP
atggcactccccgtaactgctctgctgctgccgttggcattgctcctgcacgccgcacgcccggactacaaagacgatgacgataaaggcggtggtggctctggtggtggcggatccctgcaaaacagaaggggattagacctgctttttcttaaagagggagggctctgtgctgccttaaaggaagaatgttgcttttataccacgacgccagcgccgcgaccaccaacaccggcgcccaccatcgcgtcgcagcccctgtccctgcgcccagaggcgtgccggccagcggcggggggcgcagtgcacacgagggggctggacttcgcctgtgatatctacatctgggcgcccttggccgggacttgtggggtccttctcctgtcactggttatcaccctttactgctgataaacgttactggccgaagccgcttggaataaggccggtgtgcgtttgtctatatgttattttccaccatattgccgtcttttggcaatgtgagggcccggaaacctggccctgtcttcttgacgagcattcctaggggtctttcccctctcgccaaaggaatgcaaggtctgttgaatgtcgtgaaggaagcagttcctctggaagcttcttgaagacaaacaacgtctgtagcgaccctttgcaggcagcggaaccccccacctggcgacaggtgcctctgcggccaaaagccacgtgtataagatacacctgcaaaggcggcacaaccccagtgccacgttgtgagttggatagttgtggaaagagtcaaatggctctcctcaagcgtattcaacaaggggctgaaggatgcccagaaggtaccccattgtatgggatctgatctggggcctcggtgcacatgctttacatgtgtttagtcgaggttaaaaaaacgtctaggccccccgaaccacggggacgtggttttcctttgaaaaacacgataataccatggtgagcaagggcgaggagctgttcaccggggtggtgcccatcctggtcgagctggacggcgacgtaaacggccacaagttcagcgtgtccggcgagggcgagggcgatgccacctacggcaagctgaccctgaagttcatctgcaccaccggcaagctgcccgtgccctggcccaccctcgtgaccaccctgacctacggcgtgcagtgcttcagccgctaccccgaccacatgaagcagcacgacttcttcaagtccgccatgcccgaaggctacgtccaggagcgcaccatcttcttcaaggacgacggcaactacaagacccgcgccgaggtgaagttcgagggcgacaccctggtgaaccgcatcgagctgaagggcatcgacttcaaggaggacggcaacatcctggggcacaagctggagtacaactacaacagccacaacgtctatatcatggccgacaagcagaagaacggcatcaaggtgaacttcaagatccgccacaacatcgaggacggcagcgtgcagctcgccgaccactaccagcagaacacccccatcggcgacggccccgtgctgctgcccgacaaccactacctgagcacccagtccgccctgagcaaagaccccaacgagaagcgcgatcacatggtcctgctggagttcgtgaccgccgccgggatcactctcggcatggacgagctgtacaagtaa

SEQ ID NO: 697 - protein, 118 aa, Artificial Sequence
  p15E-L-8aHTM [no flag/gfp]
MALPVTALLLPLALLLHAARPLQNRRGLDLLFLKEGGLCAALKEECCFYTTTPAPRPPTPAPTIASQPLSLRPEACRPAAGGAVHTRGLDFACDIYIWAPLAGTCGVLLLSLVITLYC

SEQ ID NO: 698 - DNA, 360 bp, Artificial Sequence
  p15E-L-8aHTM_[no flag/gfp
atggcactccccgtaactgctctgctgctgccgttggcattgctcctgcacgccgcacgcccgctgcaaaacagaaggggattagacctgctttttcttaaagagggagggctctgtgctgccttaaaggaagaatgttgcttttataccacgacgccagcgccgcgaccaccaacaccggcgcccaccatcgcgtcgcagcccctgtccctgcgcccagaggcgtgccggccagcggcggggggcgcagtgcacacgagggggctggacttcgcctgtgatatctacatctgggcgcccttggccgggacttgtggggtccttctcctgtcactggttatcaccctttactgctgataa

SEQ ID NO: 699 - protein, 375 aa, Artificial Sequence
  HTLV-8aHTM_IRES_GFP
MALPVTALLLPLALLLHAARPDYKDDDDKGGGGSGGGGSAQNRRGLDLLFWEQGGLCKALQEQCRFPTTTPAPRPPTPAPTIASQPLSLRPEACRPAAGGAVHTRGLDFACDIYIWAPLAGTCGVLLLSLVITLYCMVSKGEELFTGVVPILVELDGDVNGHKFSVSGEGEGDATYGKLTLKFICTTGKLPVPWPTLVTTLTYGVQCFSRYPDHMKQHDFFKSAMPEGYVQERTIFFKDDGNYKTRAEVKFEGDTLVNRIELKGIDFKEDGNILGHKLEYNYNSHNVYIMADKQKNGIKVNFKIRHNIEDGSVQLADHYQQNTPIGDGPVLLPDNHYLSTQSALSKDPNEKRDHMVLLEFVTAAGITLGMDELYK

SEQ ID NO: 700 - DNA, 1686 bp, Artificial Sequence
  HTLV-8aHTM_IRES_GFP
atggcactccccgtaactgctctgctgctgccgttggcattgctcctgcacgccgcacgcccggactacaaagacgatgacgataaaggcggtggtggctctggtggtggcggatccgcccagaacagacgaggccttgatctcctattctgggagcaaggaggattatgcaaagcattacaagaacagtgccgttttccgaccacgacgccagcgccgcgaccaccaacaccggcgcccaccatcgcgtcgcagcccctgtccctgcgcccagaggcgtgccggccagcggcggggggcgcagtgcacacgagggggctggacttcgcctgtgatatctacatctgggcgcccttggccgggacttgtggggtccttctcctgtcactggttatcaccctttactgctgataaacgttactggccgaagccgcttggaataaggccggtgtgcgtttgtctatatgttattttccaccatattgccgtcttttggcaatgtgagggcccggaaacctggccctgtcttcttgacgagcattcctaggggtctttcccctctcgccaaaggaatgcaaggtctgttgaatgtcgtgaaggaagcagttcctctggaagcttcttgaagacaaacaacgtctgtagcgaccctttgcaggcagcggaaccccccacctggcgacaggtgcctctgcggccaaaagccacgtgtataagatacacctgcaaaggcggcacaaccccagtgccacgttgtgagttggatagttgtggaaagagtcaaatggctctcctcaagcgtattcaacaaggggctgaaggatgcccagaaggtaccccattgtatgggatctgatctggggcctcggtgcacatgctttacatgtgtttagtcgaggttaaaaaaacgtctaggccccccgaaccacggggacgtggttttcctttgaaaaacacgataataccatggtgagcaagggcgaggagctgttcaccggggtggtgcccatcctggtcgagctggacggcgacgtaaacggccacaagttcagcgtgtccggcgagggcgagggcgatgccacctacggcaagctgaccctgaagttcatctgcaccaccggcaagctgcccgtgccctggcccaccctcgtgaccaccctgacctacggcgtgcagtgcttcagccgctaccccgaccacatgaagcagcacgacttcttcaagtccgccatgcccgaaggctacgtccaggagcgcaccatcttcttcaaggacgacggcaactacaagacccgcgccgaggtgaagttcgagggcgacaccctggtgaaccgcatcgagctgaagggcatcgacttcaaggaggacggcaacatcctggggcacaagctggagtacaactacaacagccacaacgtctatatcatggccgacaagcagaagaacggcatcaaggtgaacttcaagatccgccacaacatcgaggacggcagcgtgcagctcgccgaccactaccagcagaacacccccatcggcgacggccccgtgctgctgcccgacaaccactacctgagcacccagtccgccctgagcaaagaccccaacgagaagcgcgatcacatggtcctgctggagttcgtgaccgccgccgggatcactctcggcatggacgagctgtacaagtaa

SEQ ID NO: 701 - protein, 118 aa, Artificial Sequence
  HTLV-8aHTM_[no flag/gfp]
MALPVTALLLPLALLLHAARPAQNRRGLDLLFWEQGGLCKALQEQCRFPTTTPAPRPPTPAPTIASQPLSLRPEACRPAAGGAVHTRGLDFACDIYIWAPLAGTCGVLLLSLVITLYC

SEQ ID NO: 702 - DNA, 360 bp, Artificial Sequence
  HTLV-8aHTM_[no flag/gfp]
atggcactccccgtaactgctctgctgctgccgttggcattgctcctgcacgccgcacgcccggcccagaacagacgaggccttgatctcctattctgggagcaaggaggattatgcaaagcattacaagaacagtgccgttttccgaccacgacgccagcgccgcgaccaccaacaccggcgcccaccatcgcgtcgcagcccctgtccctgcgcccagaggcgtgccggccagcggcggggggcgcagtgcacacgagggggctggacttcgcctgtgatatctacatctgggcgcccttggccgggacttgtggggtccttctcctgtcactggttatcaccctttactgctgataa

SEQ ID NO: 703 - protein, 422 aa, Artificial Sequence
  HIV_L-8aHTM_IRES_GFP
MALPVTALLLPLALLLHAARPDYKDDDDKGGGGSGGGGSGALFLGFLGAAGSTMGAASVTLTVQARLLLSGIVQQQNNLLRAIEAQQHLLQLTVWGIKQLQARVLAVERYLRDQTTTPAPRPPTPAPTIASQPLSLRPEACRPAAGGAVHTRGLDFACDIYIWAPLAGTCGVLLLSLVITLYCMVSKGEELFTGVVPILVELDGDVNGHKFSVSGEGEGDATYGKLTLKFICTTGKLPVPWPTLVTTLTYGVQCFSRYPDHMKQHDFFKSAMPEGYVQERTIFFKDDGNYKTRAEVKFEGDTLVNRIELKGIDFKEDGNILGHKLEYNYNSHNVYIMADKQKNGIKVNFKIRHNIEDGSVQLADHYQQNTPIGDGPVLLPDNHYLSTQSALSKDPNEKRDHMVLLEFVTAAGITLGMDELYK

SEQ ID NO: 704 - DNA, 1827 bp, Artificial Sequence
  HIV_L-8aHTM_IRES_GFP
atggcactccccgtaactgctctgctgctgccgttggcattgctcctgcacgccgcacgcccggactacaaagacgatgacgataaaggcggtggtggctctggtggtggcggatccggagctttgttccttgggttcttgggagcagcaggaagcactatgggcgcagcgtcagtaacgctgacggtacaggccagactattattgtctggtatagtgcaacagcaaaacaatttgctgagggctattgaggcgcaacagcatctgttgcaactcacagtctggggcatcaaacagctccaggcaagagtcctggctgtggaaagatacctaagggatcaaaccacgacgccagcgccgcgaccaccaacaccggcgcccaccatcgcgtcgcagcccctgtccctgcgcccagaggcgtgccggccagcggcggggggcgcagtgcacacgagggggctggacttcgcctgtgatatctacatctgggcgcccttggccgggacttgtggggtccttctcctgtcactggttatcaccctttactgctgataaacgttactggccgaagccgcttggaataaggccggtgtgcgtttgtctatatgttattttccaccatattgccgtcttttggcaatgtgagggcccggaaacctggccctgtcttcttgacgagcattcctaggggtctttcccctctcgccaaaggaatgcaaggtctgttgaatgtcgtgaaggaagcagttcctctggaagcttcttgaagacaaacaacgtctgtagcgaccctttgcaggcagcggaaccccccacctggcgacaggtgcctctgcggccaaaagccacgtgtataagatacacctgcaaaggcggcacaaccccagtgccacgttgtgagttggatagttgtggaaagagtcaaatggctctcctcaagcgtattcaacaaggggctgaaggatgcccagaaggtaccccattgtatgggatctgatctggggcctcggtgcacatgctttacatgtgtttagtcgaggttaaaaaaacgtctaggccccccgaaccacggggacgtggttttcctttgaaaaacacgataataccatggtgagcaagggcgaggagctgttcaccggggtggtgcccatcctggtcgagctggacggcgacgtaaacggccacaagttcagcgtgtccggcgagggcgagggcgatgccacctacggcaagctgaccctgaagttcatctgcaccaccggcaagctgcccgtgccctggcccaccctcgtgaccaccctgacctacggcgtgcagtgcttcagccgctaccccgaccacatgaagcagcacgacttcttcaagtccgccatgcccgaaggctacgtccaggagcgcaccatcttcttcaaggacgacggcaactacaagacccgcgccgaggtgaagttcgagggcgacaccctggtgaaccgcatcgagctgaagggcatcgacttcaaggaggacggcaacatcctggggcacaagctggagtacaactacaacagccacaacgtctatatcatggccgacaagcagaagaacggcatcaaggtgaacttcaagatccgccacaacatcgaggacggcagcgtgcagctcgccgaccactaccagcagaacacccccatcggcgacggccccgtgctgctgcccgacaaccactacctgagcacccagtccgccctgagcaaagaccccaacgagaagcgcgatcacatggtcctgctggagttcgtgaccgccgccgggatcactctcggcatggacgagctgtacaagtaa

SEQ ID NO: 705 - protein, 165 aa, Artificial Sequence
  HIV_L-8aHTM_[no flag/gfp]
MALPVTALLLPLALLLHAARPGALFLGFLGAAGSTMGAASVTLTVQARLLLSGIVQQQNNLLRAIEAQQHLLQLTVWGIKQLQARVLAVERYLRDQTTTPAPRPPTPAPTIASQPLSLRPEACRPAAGGAVHTRGLDFACDIYIWAPLAGTCGVLLLSLVITLYC

SEQ ID NO: 706 - DNA, 501 bp, Artificial Sequence
  HIV_L-8aHTM_[no flag/gfp]
atggcactccccgtaactgctctgctgctgccgttggcattgctcctgcacgccgcacgcccgggagctttgttccttgggttcttgggagcagcaggaagcactatgggcgcagcgtcagtaacgctgacggtacaggccagactattattgtctggtatagtgcaacagcaaaacaatttgctgagggctattgaggcgcaacagcatctgttgcaactcacagtctggggcatcaaacagctccaggcaagagtcctggctgtggaaagatacctaagggatcaaaccacgacgccagcgccgcgaccaccaacaccggcgcccaccatcgcgtcgcagcccctgtccctgcgcccagaggcgtgccggccagcggcggggggcgcagtgcacacgagggggctggacttcgcctgtgatatctacatctgggcgcccttggccgggacttgtggggtccttctcctgtcactggttatcaccctttactgctgataa

SEQ ID NO: 707 - protein, 361 aa, Artificial Sequence
  HIV_S-8aHTM_IRES_GFP
MALPVTALLLPLALLLHAARPDYKDDDDKGGGGSGGGGSLQARILAVERYLKDTTTPAPRPPTPAPTIASQPLSLRPEACRPAAGGAVHTRGLDFACDIYIWAPLAGTCGVLLLSLVITLYCMVSKGEELFTGVVPILVELDGDVNGHKFSVSGEGEGDATYGKLTLKFICTTGKLPVPWPTLVTTLTYGVQCFSRYPDHMKQHDFFKSAMPEGYVQERTIFFKDDGNYKTRAEVKFEGDTLVNRIELKGIDFKEDGNILGHKLEYNYNSHNVYIMADKQKNGIKVNFKIRHNIEDGSVQLADHYQQNTPIGDGPVLLPDNHYLSTQSALSKDPNEKRDHMVLLEFVTAAGITLGMDELYK

SEQ ID NO: 708 - DNA, 1644 bp, Artificial Sequence
  HIV_S-8aHTM_IRES_GFP
atggcactccccgtaactgctctgctgctgccgttggcattgctcctgcacgccgcacgcccggactacaaagacgatgacgataaaggcggtggtggctctggtggtggcggatccctccaggcaagaatcctagctgtagaaagatacctaaaagataccacgacgccagcgccgcgaccaccaacaccggcgcccaccatcgcgtcgcagcccctgtccctgcgcccagaggcgtgccggccagcggcggggggcgcagtgcacacgagggggctggacttcgcctgtgatatctacatctgggcgcccttggccgggacttgtggggtccttctcctgtcactggttatcaccctttactgctgataaacgttactggccgaagccgcttggaataaggccggtgtgcgtttgtctatatgttattttccaccatattgccgtcttttggcaatgtgagggcccggaaacctggccctgtcttcttgacgagcattcctaggggtctttcccctctcgccaaaggaatgcaaggtctgttgaatgtcgtgaaggaagcagttcctctggaagcttcttgaagacaaacaacgtctgtagcgaccctttgcaggcagcggaaccccccacctggcgacaggtgcctctgcggccaaaagccacgtgtataagatacacctgcaaaggcggcacaaccccagtgccacgttgtgagttggatagttgtggaaagagtcaaatggctctcctcaagcgtattcaacaaggggctgaaggatgcccagaaggtaccccattgtatgggatctgatctggggcctcggtgcacatgctttacatgtgtttagtcgaggttaaaaaaacgtctaggccccccgaaccacggggacgtggttttcctttgaaaaacacgataataccatggtgagcaagggcgaggagctgttcaccggggtggtgcccatcctggtcgagctggacggcgacgtaaacggccacaagttcagcgtgtccggcgagggcgagggcgatgccacctacggcaagctgaccctgaagttcatctgcaccaccggcaagctgcccgtgccctggcccaccctcgtgaccaccctgacctacggcgtgcagtgcttcagccgctaccccgaccacatgaagcagcacgacttcttcaagtccgccatgcccgaaggctacgtccaggagcgcaccatcttcttcaaggacgacggcaactacaagacccgcgccgaggtgaagttcgagggcgacaccctggtgaaccgcatcgagctgaagggcatcgacttcaaggaggacggcaacatcctggggcacaagctggagtacaactacaacagccacaacgtctatatcatggccgacaagcagaagaacggcatcaaggtgaacttcaagatccgccacaacatcgaggacggcagcgtgcagctcgccgaccactaccagcagaacacccccatcggcgacggccccgtgctgctgcccgacaaccactacctgagcacccagtccgccctgagcaaagaccccaacgagaagcgcgatcacatggtcctgctggagttcgtgaccgccgccgggatcactctcggcatggacgagctgtacaagtaa

SEQ ID NO: 709 - protein, 104 aa, Artificial Sequence; identical to SEQ ID NO: 238
  HIV_S-8aHTM_no flag/gfp

SEQ ID NO: 710 - DNA, 318 bp, Artificial Sequence
  HIV_S-8aHTM_no flag/gfp
atggcactccccgtaactgctctgctgctgccgttggcattgctcctgcacgccgcacgcccgctccaggcaagaatcctagctgtagaaagatacctaaaagataccacgacgccagcgccgcgaccaccaacaccggcgcccaccatcgcgtcgcagcccctgtccctgcgcccagaggcgtgccggccagcggcggggggcgcagtgcacacgagggggctggacttcgcctgtgatatctacatctgggcgcccttggccgggacttgtggggtccttctcctgtcactggttatcaccctttactgctgataa

SEQ ID NO: 711 - protein, 404 aa, Artificial Sequence
  TCR Synthetic 3x-8aHTM_IRES_GFP
MALPVTALLLPLALLLHAARPDYKDDDDKGGGGSGGGGSAGFGLLLGFGGGGSGGGGSGGGGSAGFGLLLGFGGGGSGGGGSGGGGSAGFGLLLGFTTTPAPRPPTPAPTIASQPLSLRPEACRPAAGGAVHTRGLDFACDIYIWAPLAGTCGVLLLSLVITLYCMVSKGEELFTGVVPILVELDGDVNGHKFSVSGEGEGDATYGKLTLKFICTTGKLPVPWPTLVTTLTYGVQCFSRYPDHMKQHDFFKSAMPEGYVQERTIFFKDDGNYKTRAEVKFEGDTLVNRIELKGIDFKEDGNILGHKLEYNYNSHNVYIMADKQKNGIKVNFKIRHNIEDGSVQLADHYQQNTPIGDGPVLLPDNHYLSTQSALSKDPNEKRDHMVLLEFVTAAGITLGMDELYK

SEQ ID NO: 712 - DNA, 1773 bp, Artificial Sequence
  TCR Synthetic 3x-8aHTM_IRES_GFP
atggcactccccgtaactgctctgctgctgccgttggcattgctcctgcacgccgcacgcccggactacaaagacgatgacgataaaggcggtggtggctctggtggtggcggatccgccggcttcggcctgctgctgggcttcggtggtggcggatccggtggtggcggttctggtggtggcggctccgccggcttcggcctgctgctgggcttcggtggtggcggatccggtggtggcggttctggtggtggcggctccgccggcttcggcctgctgctgggcttcaccacgacgccagcgccgcgaccaccaacaccggcgcccaccatcgcgtcgcagcccctgtccctgcgcccagaggcgtgccggccagcggcggggggcgcagtgcacacgagggggctggacttcgcctgtgatatctacatctgggcgcccttggccgggacttgtggggtccttctcctgtcactggttatcaccctttactgctgataaacgttactggccgaagccgcttggaataaggccggtgtgcgtttgtctatatgttattttccaccatattgccgtcttttggcaatgtgagggcccggaaacctggccctgtcttcttgacgagcattcctaggggtctttcccctctcgccaaaggaatgcaaggtctgttgaatgtcgtgaaggaagcagttcctctggaagcttcttgaagacaaacaacgtctgtagcgaccctttgcaggcagcggaaccccccacctggcgacaggtgcctctgcggccaaaagccacgtgtataagatacacctgcaaaggcggcacaaccccagtgccacgttgtgagttggatagttgtggaaagagtcaaatggctctcctcaagcgtattcaacaaggggctgaaggatgcccagaaggtaccccattgtatgggatctgatctggggcctcggtgcacatgctttacatgtgtttagtcgaggttaaaaaaacgtctaggccccccgaaccacggggacgtggttttcctttgaaaaacacgataataccatggtgagcaagggcgaggagctgttcaccggggtggtgcccatcctggtcgagctggacggcgacgtaaacggccacaagttcagcgtgtccggcgagggcgagggcgatgccacctacggcaagctgaccctgaagttcatctgcaccaccggcaagctgcccgtgccctggcccaccctcgtgaccaccctgacctacggcgtgcagtgcttcagccgctaccccgaccacatgaagcagcacgacttcttcaagtccgccatgcccgaaggctacgtccaggagcgcaccatcttcttcaaggacgacggcaactacaagacccgcgccgaggtgaagttcgagggcgacaccctggtgaaccgcatcgagctgaagggcatcgacttcaaggaggacggcaacatcctggggcacaagctggagtacaactacaacagccacaacgtctatatcatggccgacaagcagaagaacggcatcaaggtgaacttcaagatccgccacaacatcgaggacggcagcgtgcagctcgccgaccactaccagcagaacacccccatcggcgacggccccgtgctgctgcccgacaaccactacctgagcacccagtccgccctgagcaaagaccccaacgagaagcgcgatcacatggtcctgctggagttcgtgaccgccgccgggatcactctcggcatggacgagctgtacaagtaa

SEQ ID NO: 713 - protein, 147 aa, Artificial Sequence; identical to SEQ ID NO: 243
  TCR Synthetic 3x-8aHTM_no flag/gfp

SEQ ID NO: 714 - DNA, 447 bp, Artificial Sequence
  TCR Synthetic 3x-8aHTM_no flag/gfp
atggcactccccgtaactgctctgctgctgccgttggcattgctcctgcacgccgcacgcccggccggcttcggcctgctgctgggcttcggtggtggcggatccggtggtggcggttctggtggtggcggctccgccggcttcggcctgctgctgggcttcggtggtggcggatccggtggtggcggttctggtggtggcggctccgccggcttcggcctgctgctgggcttcaccacgacgccagcgccgcgaccaccaacaccggcgcccaccatcgcgtcgcagcccctgtccctgcgcccagaggcgtgccggccagcggcggggggcgcagtgcacacgagggggctggacttcgcctgtgatatctacatctgggcgcccttggccgggacttgtggggtccttctcctgtcactggttatcaccctttactgctgataa

SEQ ID NO: 715 - protein, 368 aa, Artificial Sequence
  tCD47-8aHTM_IRES_GFP
MALPVTALLLPLALLLHAARPDYKDDDDKGGGGSGGGGSGNYTCEVTELTREGETIIELKTTTPAPRPPTPAPTIASQPLSLRPEACRPAAGGAVHTRGLDFACDIYIWAPLAGTCGVLLLSLVITLYCMVSKGEELFTGVVPILVELDGDVNGHKFSVSGEGEGDATYGKLTLKFICTTGKLPVPWPTLVTTLTYGVQCFSRYPDHMKQHDFFKSAMPEGYVQERTIFFKDDGNYKTRAEVKFEGDTLVNRIELKGIDFKEDGNILGHKLEYNYNSHNVYIMADKQKNGIKVNFKIRHNIEDGSVQLADHYQQNTPIGDGPVLLPDNHYLSTQSALSKDPNEKRDHMVLLEFVTAAGITLGMDELYK

SEQ ID NO: 716 - DNA, 1665 bp, Artificial Sequence
  tCD47-8aHTM_IRES_GFP
atggcactccccgtaactgctctgctgctgccgttggcattgctcctgcacgccgcacgcccggactacaaagacgatgacgataaaggcggtggtggctctggtggtggcggatccggaaactacacttgtgaagtaacagaattaaccagagaaggtgaaacgatcatcgagctaaaaaccacgacgccagcgccgcgaccaccaacaccggcgcccaccatcgcgtcgcagcccctgtccctgcgcccagaggcgtgccggccagcggcggggggcgcagtgcacacgagggggctggacttcgcctgtgatatctacatctgggcgcccttggccgggacttgtggggtccttctcctgtcactggttatcaccctttactgctgataaacgttactggccgaagccgcttggaataaggccggtgtgcgtttgtctatatgttattttccaccatattgccgtcttttggcaatgtgagggcccggaaacctggccctgtcttcttgacgagcattcctaggggtctttcccctctcgccaaaggaatgcaaggtctgttgaatgtcgtgaaggaagcagttcctctggaagcttcttgaagacaaacaacgtctgtagcgaccctttgcaggcagcggaaccccccacctggcgacaggtgcctctgcggccaaaagccacgtgtataagatacacctgcaaaggcggcacaaccccagtgccacgttgtgagttggatagttgtggaaagagtcaaatggctctcctcaagcgtattcaacaaggggctgaaggatgcccagaaggtaccccattgtatgggatctgatctggggcctcggtgcacatgctttacatgtgtttagtcgaggttaaaaaaacgtctaggccccccgaaccacggggacgtggttttcctttgaaaaacacgataataccatggtgagcaagggcgaggagctgttcaccggggtggtgcccatcctggtcgagctggacggcgacgtaaacggccacaagttcagcgtgtccggcgagggcgagggcgatgccacctacggcaagctgaccctgaagttcatctgcaccaccggcaagctgcccgtgccctggcccaccctcgtgaccaccctgacctacggcgtgcagtgcttcagccgctaccccgaccacatgaagcagcacgacttcttcaagtccgccatgcccgaaggctacgtccaggagcgcaccatcttcttcaaggacgacggcaactacaagacccgcgccgaggtgaagttcgagggcgacaccctggtgaaccgcatcgagctgaagggcatcgacttcaaggaggacggcaacatcctggggcacaagctggagtacaactacaacagccacaacgtctatatcatggccgacaagcagaagaacggcatcaaggtgaacttcaagatccgccacaacatcgaggacggcagcgtgcagctcgccgaccactaccagcagaacacccccatcggcgacggccccgtgctgctgcccgacaaccactacctgagcacccagtccgccctgagcaaagaccccaacgagaagcgcgatcacatggtcctgctggagttcgtgaccgccgccgggatcactctcggcatggacgagctgtacaagtaa

SEQ ID NO: 717 - protein, 111 aa, Artificial Sequence; identical to SEQ ID NO: 248
  tCD47-8aHTM_no flag/gfp

SEQ ID NO: 718 - DNA, 339 bp, Artificial Sequence
  tCD47-8aHTM_no flag/gfp
atggcactccccgtaactgctctgctgctgccgttggcattgctcctgcacgccgcacgcccgggaaactacacttgtgaagtaacagaattaaccagagaaggtgaaacgatcatcgagctaaaaaccacgacgccagcgccgcgaccaccaacaccggcgcccaccatcgcgtcgcagcccctgtccctgcgcccagaggcgtgccggccagcggcggggggcgcagtgcacacgagggggctggacttcgcctgtgatatctacatctgggcgcccttggccgggacttgtggggtccttctcctgtcactggttatcaccctttactgctgataa

SEQ ID NO: 719 - protein, 461 aa, Artificial Sequence
  p15Ex3-8aHTM_IRES_GFP
MALPVTALLLPLALLLHAARPDYKDDDDKGGGGSGGGGSLQNRRGLDLLFLKEGGLCAALKEECCFYGGGGSGGGGSGGGGSLQNRRGLDLLFLKEGGLCAALKEECCFYGGGGSGGGGSGGGGSLQNRRGLDLLFLKEGGLCAALKEECCFYTTTPAPRPPTPAPTIASQPLSLRPEACRPAAGGAVHTRGLDFACDIYIWAPLAGTCGVLLLSLVITLYCMVSKGEELFTGVVPILVELDGDVNGHKFSVSGEGEGDATYGKLTLKFICTTGKLPVPWPTLVTTLTYGVQCFSRYPDHMKQHDFFKSAMPEGYVQERTIFFKDDGNYKTRAEVKFEGDTLVNRIELKGIDFKEDGNILGHKLEYNYNSHNVYIMADKQKNGIKVNFKIRHNIEDGSVQLADHYQQNTPIGDGPVLLPDNHYLSTQSALSKDPNEKRDHMVLLEFVTAAGITLGMDELYK

SEQ ID NO: 720 - DNA, 1944 bp, Artificial Sequence
  p15Ex3-8aHTM_IRES_GFP
atggcactccccgtaactgctctgctgctgccgttggcattgctcctgcacgccgcacgcccggactacaaagacgatgacgataaaggcggtggtggctctggtggtggcggatccctgcaaaacagaaggggattagacctgctttttcttaaagagggagggctctgtgctgccttaaaggaagaatgttgcttttatggtggtggcggatccggtggtggcggttctggtggtggcggctccctgcaaaacagaaggggattagacctgctttttcttaaagagggagggctctgtgctgccttaaaggaagaatgttgcttttatggtggtggcggatccggtggtggcggttctggtggtggcggctccctgcaaaacagaaggggattagacctgctttttcttaaagagggagggctctgtgctgccttaaaggaagaatgttgcttttataccacgacgccagcgccgcgaccaccaacaccggcgcccaccatcgcgtcgcagcccctgtccctgcgcccagaggcgtgccggccagcggcggggggcgcagtgcacacgagggggctggacttcgcctgtgatatctacatctgggcgcccttggccgggacttgtggggtccttctcctgtcactggttatcaccctttactgctgataaacgttactggccgaagccgcttggaataaggccggtgtgcgtttgtctatatgttattttccaccatattgccgtcttttggcaatgtgagggcccggaaacctggccctgtcttcttgacgagcattcctaggggtctttcccctctcgccaaaggaatgcaaggtctgttgaatgtcgtgaaggaagcagttcctctggaagcttcttgaagacaaacaacgtctgtagcgaccctttgcaggcagcggaaccccccacctggcgacaggtgcctctgcggccaaaagccacgtgtataagatacacctgcaaaggcggcacaaccccagtgccacgttgtgagttggatagttgtggaaagagtcaaatggctctcctcaagcgtattcaacaaggggctgaaggatgcccagaaggtaccccattgtatgggatctgatctggggcctcggtgcacatgctttacatgtgtttagtcgaggttaaaaaaacgtctaggccccccgaaccacggggacgtggttttcctttgaaaaacacgataataccatggtgagcaagggcgaggagctgttcaccggggtggtgcccatcctggtcgagctggacggcgacgtaaacggccacaagttcagcgtgtccggcgagggcgagggcgatgccacctacggcaagctgaccctgaagttcatctgcaccaccggcaagctgcccgtgccctggcccaccctcgtgaccaccctgacctacggcgtgcagtgcttcagccgctaccccgaccacatgaagcagcacgacttcttcaagtccgccatgcccgaaggctacgtccaggagcgcaccatcttcttcaaggacgacggcaactacaagacccgcgccgaggtgaagttcgagggcgacaccctggtgaaccgcatcgagctgaagggcatcgacttcaaggaggacggcaacatcctggggcacaagctggagtacaactacaacagccacaacgtctatatcatggccgacaagcagaagaacggcatcaaggtgaacttcaagatccgccacaacatcgaggacggcagcgtgcagctcgccgaccactaccagcagaacacccccatcggcgacggccccgtgctgctgcccgacaaccactacctgagcacccagtccgccctgagcaaagaccccaacgagaagcgcgatcacatggtcctgctggagttcgtgaccgccgccgggatcactctcggcatggacgagctgtacaagtaa

SEQ ID NO: 721 - protein, 204 aa, Artificial Sequence; identical to SEQ ID NO: 253
  p15Ex3-8aHTM_no flag/gfp

SEQ ID NO: 722 - DNA, 618 bp, Artificial Sequence
  p15Ex3-8aHTM_no flag/gfp
atggcactccccgtaactgctctgctgctgccgttggcattgctcctgcacgccgcacgcccgctgcaaaacagaaggggattagacctgctttttcttaaagagggagggctctgtgctgccttaaaggaagaatgttgcttttatggtggtggcggatccggtggtggcggttctggtggtggcggctccctgcaaaacagaaggggattagacctgctttttcttaaagagggagggctctgtgctgccttaaaggaagaatgttgcttttatggtggtggcggatccggtggtggcggttctggtggtggcggctccctgcaaaacagaaggggattagacctgctttttcttaaagagggagggctctgtgctgccttaaaggaagaatgttgcttttataccacgacgccagcgccgcgaccaccaacaccggcgcccaccatcgcgtcgcagcccctgtccctgcgcccagaggcgtgccggccagcggcggggggcgcagtgcacacgagggggctggacttcgcctgtgatatctacatctgggcgcccttggccgggacttgtggggtccttctcctgtcactggttatcaccctttactgctgataa

SEQ ID NO: 723 - protein, 411 aa, Artificial Sequence
  p15E_tCD47-8aHTM_IRES_GFP
MALPVTALLLPLALLLHAARPDYKDDDDKGGGGSGGGGSLQNRRGLDLLFLKEGGLCAALKEECCFYGGGGSGGGGSGGGGSGNYTCEVTELTREGETIIELKTTTPAPRPPTPAPTIASQPLSLRPEACRPAAGGAVHTRGLDFACDIYIWAPLAGTCGVLLLSLVITLYCMVSKGEELFTGVVPILVELDGDVNGHKFSVSGEGEGDATYGKLTLKFICTTGKLPVPWPTLVTTLTYGVQCFSRYPDHMKQHDFFKSAMPEGYVQERTIFFKDDGNYKTRAEVKFEGDTLVNRIELKGIDFKEDGNILGHKLEYNYNSHNVYIMADKQKNGIKVNFKIRHNIEDGSVQLADHYQQNTPIGDGPVLLPDNHYLSTQSALSKDPNEKRDHMVLLEFVTAAGITLGMDELYK

SEQ ID NO: 724 - DNA, 1794 bp, Artificial Sequence
  p15E_tCD47-8aHTM_IRES_GFP
atggcactccccgtaactgctctgctgctgccgttggcattgctcctgcacgccgcacgcccggactacaaagacgatgacgataaaggcggtggtggctctggtggtggcggatccctgcaaaacagaaggggattagacctgctttttcttaaagagggagggctctgtgctgccttaaaggaagaatgttgcttttatggtggtggcggatccggtggtggcggttctggtggtggcggctccggaaactacacttgtgaagtaacagaattaaccagagaaggtgaaacgatcatcgagctaaaaaccacgacgccagcgccgcgaccaccaacaccggcgcccaccatcgcgtcgcagcccctgtccctgcgcccagaggcgtgccggccagcggcggggggcgcagtgcacacgagggggctggacttcgcctgtgatatctacatctgggcgcccttggccgggacttgtggggtccttctcctgtcactggttatcaccctttactgctgataaacgttactggccgaagccgcttggaataaggccggtgtgcgtttgtctatatgttattttccaccatattgccgtcttttggcaatgtgagggcccggaaacctggccctgtcttcttgacgagcattcctaggggtctttcccctctcgccaaaggaatgcaaggtctgttgaatgtcgtgaaggaagcagttcctctggaagcttcttgaagacaaacaacgtctgtagcgaccctttgcaggcagcggaaccccccacctggcgacaggtgcctctgcggccaaaagccacgtgtataagatacacctgcaaaggcggcacaaccccagtgccacgttgtgagttggatagttgtggaaagagtcaaatggctctcctcaagcgtattcaacaaggggctgaaggatgcccagaaggtaccccattgtatgggatctgatctggggcctcggtgcacatgctttacatgtgtttagtcgaggttaaaaaaacgtctaggccccccgaaccacggggacgtggttttcctttgaaaaacacgataataccatggtgagcaagggcgaggagctgttcaccggggtggtgcccatcctggtcgagctggacggcgacgtaaacggccacaagttcagcgtgtccggcgagggcgagggcgatgccacctacggcaagctgaccctgaagttcatctgcaccaccggcaagctgcccgtgccctggcccaccctcgtgaccaccctgacctacggcgtgcagtgcttcagccgctaccccgaccacatgaagcagcacgacttcttcaagtccgccatgcccgaaggctacgtccaggagcgcaccatcttcttcaaggacgacggcaactacaagacccgcgccgaggtgaagttcgagggcgacaccctggtgaaccgcatcgagctgaagggcatcgacttcaaggaggacggcaacatcctggggcacaagctggagtacaactacaacagccacaacgtctatatcatggccgacaagcagaagaacggcatcaaggtgaacttcaagatccgccacaacatcgaggacggcagcgtgcagctcgccgaccactaccagcagaacacccccatcggcgacggccccgtgctgctgcccgacaaccactacctgagcacccagtccgccctgagcaaagaccccaacgagaagcgcgatcacatggtcctgctggagttcgtgaccgccgccgggatcactctcggcatggacgagctgtacaagtaa

SEQ ID NO: 725 - protein, 154 aa, Artificial Sequence; identical to SEQ ID NO: 256
  p15E_tCD47-8aHTM_no flag/gfp

SEQ ID NO: 726 - DNA, 468 bp, Artificial Sequence
  p15E_tCD47-8aHTM_no flag/gfp
atggcactccccgtaactgctctgctgctgccgttggcattgctcctgcacgccgcacgcccgctgcaaaacagaaggggattagacctgctttttcttaaagagggagggctctgtgctgccttaaaggaagaatgttgcttttatggtggtggcggatccggtggtggcggttctggtggtggcggctccggaaactacacttgtgaagtaacagaattaaccagagaaggtgaaacgatcatcgagctaaaaaccacgacgccagcgccgcgaccaccaacaccggcgcccaccatcgcgtcgcagcccctgtccctgcgcccagaggcgtgccggccagcggcggggggcgcagtgcacacgagggggctggacttcgcctgtgatatctacatctgggcgcccttggccgggacttgtggggtccttctcctgtcactggttatcaccctttactgctgataa

SEQ ID NO: 727 - protein, 411 aa, Artificial Sequence
  tCD47_p15E-8aHTM_IRES_GFP
MALPVTALLLPLALLLHAARPDYKDDDDKGGGGSGGGGSGNYTCEVTELTREGETIIELKGGGGSGGGGSGGGGSLQNRRGLDLLFLKEGGLCAALKEECCFYTTTPAPRPPTPAPTIASQPLSLRPEACRPAAGGAVHTRGLDFACDIYIWAPLAGTCGVLLLSLVITLYCMVSKGEELFTGVVPILVELDGDVNGHKFSVSGEGEGDATYGKLTLKFICTTGKLPVPWPTLVTTLTYGVQCFSRYPDHMKQHDFFKSAMPEGYVQERTIFFKDDGNYKTRAEVKFEGDTLVNRIELKGIDFKEDGNILGHKLEYNYNSHNVYIMADKQKNGIKVNFKIRHNIEDGSVQLADHYQQNTPIGDGPVLLPDNHYLSTQSALSKDPNEKRDHMVLLEFVTAAGITLGMDELYK

SEQ ID NO: 728 - DNA, 1794 bp, Artificial Sequence
  tCD47_p15E-8aHTM_IRES_GFP
atggcactccccgtaactgctctgctgctgccgttggcattgctcctgcacgccgcacgcccggactacaaagacgatgacgataaaggcggtggtggctctggtggtggcggatccggaaactacacttgtgaagtaacagaattaaccagagaaggtgaaacgatcatcgagctaaaaggtggtggcggatccggtggtggcggttctggtggtggcggctccctgcaaaacagaaggggattagacctgctttttcttaaagagggagggctctgtgctgccttaaaggaagaatgttgcttttataccacgacgccagcgccgcgaccaccaacaccggcgcccaccatcgcgtcgcagcccctgtccctgcgcccagaggcgtgccggccagcggcggggggcgcagtgcacacgagggggctggacttcgcctgtgatatctacatctgggcgcccttggccgggacttgtggggtccttctcctgtcactggttatcaccctttactgctgataaacgttactggccgaagccgcttggaataaggccggtgtgcgtttgtctatatgttattttccaccatattgccgtcttttggcaatgtgagggcccggaaacctggccctgtcttcttgacgagcattcctaggggtctttcccctctcgccaaaggaatgcaaggtctgttgaatgtcgtgaaggaagcagttcctctggaagcttcttgaagacaaacaacgtctgtagcgaccctttgcaggcagcggaaccccccacctggcgacaggtgcctctgcggccaaaagccacgtgtataagatacacctgcaaaggcggcacaaccccagtgccacgttgtgagttggatagttgtggaaagagtcaaatggctctcctcaagcgtattcaacaaggggctgaaggatgcccagaaggtaccccattgtatgggatctgatctggggcctcggtgcacatgctttacatgtgtttagtcgaggttaaaaaaacgtctaggccccccgaaccacggggacgtggttttcctttgaaaaacacgataataccatggtgagcaagggcgaggagctgttcaccggggtggtgcccatcctggtcgagctggacggcgacgtaaacggccacaagttcagcgtgtccggcgagggcgagggcgatgccacctacggcaagctgaccctgaagttcatctgcaccaccggcaagctgcccgtgccctggcccaccctcgtgaccaccctgacctacggcgtgcagtgcttcagccgctaccccgaccacatgaagcagcacgacttcttcaagtccgccatgcccgaaggctacgtccaggagcgcaccatcttcttcaaggacgacggcaactacaagacccgcgccgaggtgaagttcgagggcgacaccctggtgaaccgcatcgagctgaagggcatcgacttcaaggaggacggcaacatcctggggcacaagctggagtacaactacaacagccacaacgtctatatcatggccgacaagcagaagaacggcatcaaggtgaacttcaagatccgccacaacatcgaggacggcagcgtgcagctcgccgaccactaccagcagaacacccccatcggcgacggccccgtgctgctgcccgacaaccactacctgagcacccagtccgccctgagcaaagaccccaacgagaagcgcgatcacatggtcctgctggagttcgtgaccgccgccgggatcactctcggcatggacgagctgtacaagtaa

SEQ ID NO: 729 - protein, 154 aa, Artificial Sequence; identical to SEQ ID NO: 259
  tCD47_p15E-8aHTM_no flag gfp

SEQ ID NO: 730 - DNA, 468 bp, Artificial Sequence
  tCD47_p15E-8aHTM_no flag gfp
atggcactccccgtaactgctctgctgctgccgttggcattgctcctgcacgccgcacgcccgggaaactacacttgtgaagtaacagaattaaccagagaaggtgaaacgatcatcgagctaaaaggtggtggcggatccggtggtggcggttctggtggtggcggctccctgcaaaacagaaggggattagacctgctttttcttaaagagggagggctctgtgctgccttaaaggaagaatgttgcttttataccacgacgccagcgccgcgaccaccaacaccggcgcccaccatcgcgtcgcagcccctgtccctgcgcccagaggcgtgccggccagcggcggggggcgcagtgcacacgagggggctggacttcgcctgtgatatctacatctgggcgcccttggccgggacttgtggggtccttctcctgtcactggttatcaccctttactgctgataa

SEQ ID NO: 731 - protein, 458 aa, Artificial Sequence
  HIV_L_tCD47-8aHTM_IRES_GFP
MALPVTALLLPLALLLHAARPDYKDDDDKGGGGSGGGGSGALFLGFLGAAGSTMGAASVTLTVQARLLLSGIVQQQNNLLRAIEAQQHLLQLTVWGIKQLQARVLAVERYLRDQGGGGSGGGGSGGGGSGNYTCEVTELTREGETIIELKTTTPAPRPPTPAPTIASQPLSLRPEACRPAAGGAVHTRGLDFACDIYIWAPLAGTCGVLLLSLVITLYCMVSKGEELFTGVVPILVELDGDVNGHKFSVSGEGEGDATYGKLTLKFICTTGKLPVPWPTLVTTLTYGVQCFSRYPDHMKQHDFFKSAMPEGYVQERTIFFKDDGNYKTRAEVKFEGDTLVNRIELKGIDFKEDGNILGHKLEYNYNSHNVYIMADKQKNGIKVNFKIRHNIEDGSVQLADHYQQNTPIGDGPVLLPDNHYLSTQSALSKDPNEKRDHMVLLEFVTAAGITLGMDELYK

SEQ ID NO: 732 - DNA, 1935 bp, Artificial Sequence
  HIV_L_tCD47-8aHTM_IRES_GFP
atggcactccccgtaactgctctgctgctgccgttggcattgctcctgcacgccgcacgcccggactacaaagacgatgacgataaaggcggtggtggctctggtggtggcggatccggagctttgttccttgggttcttgggagcagcaggaagcactatgggcgcagcgtcagtaacgctgacggtacaggccagactattattgtctggtatagtgcaacagcaaaacaatttgctgagggctattgaggcgcaacagcatctgttgcaactcacagtctggggcatcaaacagctccaggcaagagtcctggctgtggaaagatacctaagggatcaaggtggtggcggatccggtggtggcggttctggtggtggcggctccggaaactacacttgtgaagtaacagaattaaccagagaaggtgaaacgatcatcgagctaaaaaccacgacgccagcgccgcgaccaccaacaccggcgcccaccatcgcgtcgcagcccctgtccctgcgcccagaggcgtgccggccagcggcggggggcgcagtgcacacgagggggctggacttcgcctgtgatatctacatctgggcgcccttggccgggacttgtggggtccttctcctgtcactggttatcaccctttactgctgataaacgttactggccgaagccgcttggaataaggccggtgtgcgtttgtctatatgttattttccaccatattgccgtcttttggcaatgtgagggcccggaaacctggccctgtcttcttgacgagcattcctaggggtctttcccctctcgccaaaggaatgcaaggtctgttgaatgtcgtgaaggaagcagttcctctggaagcttcttgaagacaaacaacgtctgtagcgaccctttgcaggcagcggaaccccccacctggcgacaggtgcctctgcggccaaaagccacgtgtataagatacacctgcaaaggcggcacaaccccagtgccacgttgtgagttggatagttgtggaaagagtcaaatggctctcctcaagcgtattcaacaaggggctgaaggatgcccagaaggtaccccattgtatgggatctgatctggggcctcggtgcacatgctttacatgtgtttagtcgaggttaaaaaaacgtctaggccccccgaaccacggggacgtggttttcctttgaaaaacacgataataccatggtgagcaagggcgaggagctgttcaccggggtggtgcccatcctggtcgagctggacggcgacgtaaacggccacaagttcagcgtgtccggcgagggcgagggcgatgccacctacggcaagctgaccctgaagttcatctgcaccaccggcaagctgcccgtgccctggcccaccctcgtgaccaccctgacctacggcgtgcagtgcttcagccgctaccccgaccacatgaagcagcacgacttcttcaagtccgccatgcccgaaggctacgtccaggagcgcaccatcttcttcaaggacgacggcaactacaagacccgcgccgaggtgaagttcgagggcgacaccctggtgaaccgcatcgagctgaagggcatcgacttcaaggaggacggcaacatcctggggcacaagctggagtacaactacaacagccacaacgtctatatcatggccgacaagcagaagaacggcatcaaggtgaacttcaagatccgccacaacatcgaggacggcagcgtgcagctcgccgaccactaccagcagaacacccccatcggcgacggccccgtgctgctgcccgacaaccactacctgagcacccagtccgccctgagcaaagaccccaacgagaagcgcgatcacatggtcctgctggagttcgtgaccgccgccgggatcactctcggcatggacgagctgtacaagtaa

SEQ ID NO: 733 - protein, 201 aa, Artificial Sequence
  HIV_L_tCD47-8aHTM_no flag/gfp
MALPVTALLLPLALLLHAARPGALFLGFLGAAGSTMGAASVTLTVQARLLLSGIVQQQNNLLRAIEAQQHLLQLTVWGIKQLQARVLAVERYLRDQGGGGSGGGGSGGGGSGNYTCEVTELTREGETIIELKTTTPAPRPPTPAPTIASQPLSLRPEACRPAAGGAVHTRGLDFACDIYIWAPLAGTCGVLLLSLVITLYC

SEQ ID NO: 734 - DNA, 609 bp, Artificial Sequence
  HIV_L_tCD47-8aHTM_no flag/gfp
atggcactccccgtaactgctctgctgctgccgttggcattgctcctgcacgccgcacgcccgggagctttgttccttgggttcttgggagcagcaggaagcactatgggcgcagcgtcagtaacgctgacggtacaggccagactattattgtctggtatagtgcaacagcaaaacaatttgctgagggctattgaggcgcaacagcatctgttgcaactcacagtctggggcatcaaacagctccaggcaagagtcctggctgtggaaagatacctaagggatcaaggtggtggcggatccggtggtggcggttctggtggtggcggctccggaaactacacttgtgaagtaacagaattaaccagagaaggtgaaacgatcatcgagctaaaaaccacgacgccagcgccgcgaccaccaacaccggcgcccaccatcgcgtcgcagcccctgtccctgcgcccagaggcgtgccggccagcggcggggggcgcagtgcacacgagggggctggacttcgcctgtgatatctacatctgggcgcccttggccgggacttgtggggtccttctcctgtcactggttatcaccctttactgctgataa

SEQ ID NO: 735 - protein, 397 aa, Artificial Sequence
  HIV_S_tCD47-8aHTM_IRES_GFP
MALPVTALLLPLALLLHAARPDYKDDDDKGGGGSGGGGSLQARILAVERYLKDGGGGSGGGGSGGGGSGNYTCEVTELTREGETIIELKTTTPAPRPPTPAPTIASQPLSLRPEACRPAAGGAVHTRGLDFACDIYIWAPLAGTCGVLLLSLVITLYCMVSKGEELFTGVVPILVELDGDVNGHKFSVSGEGEGDATYGKLTLKFICTTGKLPVPWPTLVTTLTYGVQCFSRYPDHMKQHDFFKSAMPEGYVQERTIFFKDDGNYKTRAEVKFEGDTLVNRIELKGIDFKEDGNILGHKLEYNYNSHNVYIMADKQKNGIKVNFKIRHNIEDGSVQLADHYQQNTPIGDGPVLLPDNHYLSTQSALSKDPNEKRDHMVLLEFVTAAGITLGMDELYK

SEQ ID NO: 736 - DNA, 1752 bp, Artificial Sequence
  HIV_S_tCD47-8aHTM_IRES_GFP
atggcactccccgtaactgctctgctgctgccgttggcattgctcctgcacgccgcacgcccggactacaaagacgatgacgataaaggcggtggtggctctggtggtggcggatccctccaggcaagaatcctagctgtagaaagatacctaaaagatggtggtggcggatccggtggtggcggttctggtggtggcggctccggaaactacacttgtgaagtaacagaattaaccagagaaggtgaaacgatcatcgagctaaaaaccacgacgccagcgccgcgaccaccaacaccggcgcccaccatcgcgtcgcagcccctgtccctgcgcccagaggcgtgccggccagcggcggggggcgcagtgcacacgagggggctggacttcgcctgtgatatctacatctgggcgcccttggccgggacttgtggggtccttctcctgtcactggttatcaccctttactgctgataaacgttactggccgaagccgcttggaataaggccggtgtgcgtttgtctatatgttattttccaccatattgccgtcttttggcaatgtgagggcccggaaacctggccctgtcttcttgacgagcattcctaggggtctttcccctctcgccaaaggaatgcaaggtctgttgaatgtcgtgaaggaagcagttcctctggaagcttcttgaagacaaacaacgtctgtagcgaccctttgcaggcagcggaaccccccacctggcgacaggtgcctctgcggccaaaagccacgtgtataagatacacctgcaaaggcggcacaaccccagtgccacgttgtgagttggatagttgtggaaagagtcaaatggctctcctcaagcgtattcaacaaggggctgaaggatgcccagaaggtaccccattgtatgggatctgatctggggcctcggtgcacatgctttacatgtgtttagtcgaggttaaaaaaacgtctaggccccccgaaccacggggacgtggttttcctttgaaaaacacgataataccatggtgagcaagggcgaggagctgttcaccggggtggtgcccatcctggtcgagctggacggcgacgtaaacggccacaagttcagcgtgtccggcgagggcgagggcgatgccacctacggcaagctgaccctgaagttcatctgcaccaccggcaagctgcccgtgccctggcccaccctcgtgaccaccctgacctacggcgtgcagtgcttcagccgctaccccgaccacatgaagcagcacgacttcttcaagtccgccatgcccgaaggctacgtccaggagcgcaccatcttcttcaaggacgacggcaactacaagacccgcgccgaggtgaagttcgagggcgacaccctggtgaaccgcatcgagctgaagggcatcgacttcaaggaggacggcaacatcctggggcacaagctggagtacaactacaacagccacaacgtctatatcatggccgacaagcagaagaacggcatcaaggtgaacttcaagatccgccacaacatcgaggacggcagcgtgcagctcgccgaccactaccagcagaacacccccatcggcgacggccccgtgctgctgcccgacaaccactacctgagcacccagtccgccctgagcaaagaccccaacgagaagcgcgatcacatggtcctgctggagttcgtgaccgccgccgggatcactctcggcatggacgagctgtacaagtaa

SEQ ID NO: 737 - protein, 140 aa, Artificial Sequence; identical to SEQ ID NO: 265
  HIV_S_tCD47-8aHTM_no flag/gfp

SEQ ID NO: 738 - DNA, 426 bp, Artificial Sequence
  HIV_S_tCD47-8aHTM_no flag/gfp
atggcactccccgtaactgctctgctgctgccgttggcattgctcctgcacgccgcacgcccgctccaggcaagaatcctagctgtagaaagatacctaaaagatggtggtggcggatccggtggtggcggttctggtggtggcggctccggaaactacacttgtgaagtaacagaattaaccagagaaggtgaaacgatcatcgagctaaaaaccacgacgccagcgccgcgaccaccaacaccggcgcccaccatcgcgtcgcagcccctgtccctgcgcccagaggcgtgccggccagcggcggggggcgcagtgcacacgagggggctggacttcgcctgtgatatctacatctgggcgcccttggccgggacttgtggggtccttctcctgtcactggttatcaccctttactgctgataa

SEQ ID NO: 739 - protein, 411 aa, Artificial Sequence
  HTLV_tCD47-8aHTM_IRES_GFP
MALPVTALLLPLALLLHAARPDYKDDDDKGGGGSGGGGSAQNRRGLDLLFWEQGGLCKALQEQCRFPGGGGSGGGGSGGGGSGNYTCEVTELTREGETIIELKTTTPAPRPPTPAPTIASQPLSLRPEACRPAAGGAVHTRGLDFACDIYIWAPLAGTCGVLLLSLVITLYCMVSKGEELFTGVVPILVELDGDVNGHKFSVSGEGEGDATYGKLTLKFICTTGKLPVPWPTLVTTLTYGVQCFSRYPDHMKQHDFFKSAMPEGYVQERTIFFKDDGNYKTRAEVKFEGDTLVNRIELKGIDFKEDGNILGHKLEYNYNSHNVYIMADKQKNGIKVNFKIRHNIEDGSVQLADHYQQNTPIGDGPVLLPDNHYLSTQSALSKDPNEKRDHMVLLEFVTAAGITLGMDELYK

SEQ ID NO: 740 - DNA, 1794 bp, Artificial Sequence
  HTLV_tCD47-8aHTM_IRES_GFP
atggcactccccgtaactgctctgctgctgccgttggcattgctcctgcacgccgcacgcccggactacaaagacgatgacgataaaggcggtggtggctctggtggtggcggatccgcccagaacagacgaggccttgatctcctattctgggagcaaggaggattatgcaaagcattacaagaacagtgccgttttccgggtggtggcggatccggtggtggcggttctggtggtggcggctccggaaactacacttgtgaagtaacagaattaaccagagaaggtgaaacgatcatcgagctaaaaaccacgacgccagcgccgcgaccaccaacaccggcgcccaccatcgcgtcgcagcccctgtccctgcgcccagaggcgtgccggccagcggcggggggcgcagtgcacacgagggggctggacttcgcctgtgatatctacatctgggcgcccttggccgggacttgtggggtccttctcctgtcactggttatcaccctttactgctgataaacgttactggccgaagccgcttggaataaggccggtgtgcgtttgtctatatgttattttccaccatattgccgtcttttggcaatgtgagggcccggaaacctggccctgtcttcttgacgagcattcctaggggtctttcccctctcgccaaaggaatgcaaggtctgttgaatgtcgtgaaggaagcagttcctctggaagcttcttgaagacaaacaacgtctgtagcgaccctttgcaggcagcggaaccccccacctggcgacaggtgcctctgcggccaaaagccacgtgtataagatacacctgcaaaggcggcacaaccccagtgccacgttgtgagttggatagttgtggaaagagtcaaatggctctcctcaagcgtattcaacaaggggctgaaggatgcccagaaggtaccccattgtatgggatctgatctggggcctcggtgcacatgctttacatgtgtttagtcgaggttaaaaaaacgtctaggccccccgaaccacggggacgtggttttcctttgaaaaacacgataataccatggtgagcaagggcgaggagctgttcaccggggtggtgcccatcctggtcgagctggacggcgacgtaaacggccacaagttcagcgtgtccggcgagggcgagggcgatgccacctacggcaagctgaccctgaagttcatctgcaccaccggcaagctgcccgtgccctggcccaccctcgtgaccaccctgacctacggcgtgcagtgcttcagccgctaccccgaccacatgaagcagcacgacttcttcaagtccgccatgcccgaaggctacgtccaggagcgcaccatcttcttcaaggacgacggcaactacaagacccgcgccgaggtgaagttcgagggcgacaccctggtgaaccgcatcgagctgaagggcatcgacttcaaggaggacggcaacatcctggggcacaagctggagtacaactacaacagccacaacgtctatatcatggccgacaagcagaagaacggcatcaaggtgaacttcaagatccgccacaacatcgaggacggcagcgtgcagctcgccgaccactaccagcagaacacccccatcggcgacggccccgtgctgctgcccgacaaccactacctgagcacccagtccgccctgagcaaagaccccaacgagaagcgcgatcacatggtcctgctggagttcgtgaccgccgccgggatcactctcggcatggacgagctgtacaagtaa

SEQ ID NO: 741 - protein, 154 aa, Artificial Sequence; identical to SEQ ID NO: 268
  HTLV_tCD47-8aHTM_no flag/gfp

SEQ ID NO: 742 - DNA, 468 bp, Artificial Sequence
  HTLV_tCD47-8aHTM_no flag/gfp
atggcactccccgtaactgctctgctgctgccgttggcattgctcctgcacgccgcacgcccggcccagaacagacgaggccttgatctcctattctgggagcaaggaggattatgcaaagcattacaagaacagtgccgttttccgggtggtggcggatccggtggtggcggttctggtggtggcggctccggaaactacacttgtgaagtaacagaattaaccagagaaggtgaaacgatcatcgagctaaaaaccacgacgccagcgccgcgaccaccaacaccggcgcccaccatcgcgtcgcagcccctgtccctgcgcccagaggcgtgccggccagcggcggggggcgcagtgcacacgagggggctggacttcgcctgtgatatctacatctgggcgcccttggccgggacttgtggggtccttctcctgtcactggttatcaccctttactgctgataa

SEQ ID NO: 743 - protein, 454 aa, Artificial Sequence
  tCD47_p15Ex2-8aHTM_IRES_GFP
MALPVTALLLPLALLLHAARPDYKDDDDKGGGGSGGGGSGNYTCEVTELTREGETIIELKGGGGSGGGGSGGGGSLQNRRGLDLLFLKEGGLCAALKEECCFYGGGGSGGGGSGGGGSLQNRRGLDLLFLKEGGLCAALKEECCFYTTTPAPRPPTPAPTIASQPLSLRPEACRPAAGGAVHTRGLDFACDIYIWAPLAGTCGVLLLSLVITLYCMVSKGEELFTGVVPILVELDGDVNGHKFSVSGEGEGDATYGKLTLKFICTTGKLPVPWPTLVTTLTYGVQCFSRYPDHMKQHDFFKSAMPEGYVQERTIFFKDDGNYKTRAEVKFEGDTLVNRIELKGIDFKEDGNILGHKLEYNYNSHNVYIMADKQKNGIKVNFKIRHNIEDGSVQLADHYQQNTPIGDGPVLLPDNHYLSTQSALSKDPNEKRDHMVLLEFVTAAGITLGMDELYK

SEQ ID NO: 744 - DNA, 1923 bp, Artificial Sequence
  tCD47_p15Ex2-8aHTM_IRES_GFP
atggcactccccgtaactgctctgctgctgccgttggcattgctcctgcacgccgcacgcccggactacaaagacgatgacgataaaggcggtggtggctctggtggtggcggatccggaaactacacttgtgaagtaacagaattaaccagagaaggtgaaacgatcatcgagctaaaaggtggtggcggatccggtggtggcggttctggtggtggcggctccctgcaaaacagaaggggattagacctgctttttcttaaagagggagggctctgtgctgccttaaaggaagaatgttgcttttatggtggtggcggatccggtggtggcggttctggtggtggcggctccctgcaaaacagaaggggattagacctgctttttcttaaagagggagggctctgtgctgccttaaaggaagaatgttgcttttataccacgacgccagcgccgcgaccaccaacaccggcgcccaccatcgcgtcgcagcccctgtccctgcgcccagaggcgtgccggccagcggcggggggcgcagtgcacacgagggggctggacttcgcctgtgatatctacatctgggcgcccttggccgggacttgtggggtccttctcctgtcactggttatcaccctttactgctgataaacgttactggccgaagccgcttggaataaggccggtgtgcgtttgtctatatgttattttccaccatattgccgtcttttggcaatgtgagggcccggaaacctggccctgtcttcttgacgagcattcctaggggtctttcccctctcgccaaaggaatgcaaggtctgttgaatgtcgtgaaggaagcagttcctctggaagcttcttgaagacaaacaacgtctgtagcgaccctttgcaggcagcggaaccccccacctggcgacaggtgcctctgcggccaaaagccacgtgtataagatacacctgcaaaggcggcacaaccccagtgccacgttgtgagttggatagttgtggaaagagtcaaatggctctcctcaagcgtattcaacaaggggctgaaggatgcccagaaggtaccccattgtatgggatctgatctggggcctcggtgcacatgctttacatgtgtttagtcgaggttaaaaaaacgtctaggccccccgaaccacggggacgtggttttcctttgaaaaacacgataataccatggtgagcaagggcgaggagctgttcaccggggtggtgcccatcctggtcgagctggacggcgacgtaaacggccacaagttcagcgtgtccggcgagggcgagggcgatgccacctacggcaagctgaccctgaagttcatctgcaccaccggcaagctgcccgtgccctggcccaccctcgtgaccaccctgacctacggcgtgcagtgcttcagccgctaccccgaccacatgaagcagcacgacttcttcaagtccgccatgcccgaaggctacgtccaggagcgcaccatcttcttcaaggacgacggcaactacaagacccgcgccgaggtgaagttcgagggcgacaccctggtgaaccgcatcgagctgaagggcatcgacttcaaggaggacggcaacatcctggggcacaagctggagtacaactacaacagccacaacgtctatatcatggccgacaagcagaagaacggcatcaaggtgaacttcaagatccgccacaacatcgaggacggcagcgtgcagctcgccgaccactaccagcagaacacccccatcggcgacggccccgtgctgctgcccgacaaccactacctgagcacccagtccgccctgagcaaagaccccaacgagaagcgcgatcacatggtcctgctggagttcgtgaccgccgccgggatcactctcggcatggacgagctgtacaagtaa

SEQ ID NO: 745 - protein, 196 aa, Artificial Sequence
  tCD47_p15Ex2-8aHTM_noflag/gfp
MALPVTALLLPLALLLHAARPGNYTCEVTELTREGETIIELKGGGSGGGGSGGGGSLQNRRGLDLLFLKEGGLCAALKEECCFYGGGGSGGGGSGGGGSLQNRRGLDLLFLKEGGLCAALKEECCFYTTTPAPRPPTPAPTIASQPLSLRPEACRPAAGGAVHTRGLDFACDIYIWAPLAGTCGVLLLSLVITLYC

SEQ ID NO: 746 - DNA, 597 bp, Artificial Sequence
  tCD47_p15Ex2-8aHTM_noflag/gfp
atggcactccccgtaactgctctgctgctgccgttggcattgctcctgcacgccgcacgcccgggaaactacacttgtgaagtaacagaattaaccagagaaggtgaaacgatcatcgagctaaaaggtggtggcggatccggtggtggcggttctggtggtggcggctccctgcaaaacagaaggggattagacctgctttttcttaaagagggagggctctgtgctgccttaaaggaagaatgttgcttttatggtggtggcggatccggtggtggcggttctggtggtggcggctccctgcaaaacagaaggggattagacctgctttttcttaaagagggagggctctgtgctgccttaaaggaagaatgttgcttttataccacgacgccagcgccgcgaccaccaacaccggcgcccaccatcgcgtcgcagcccctgtccctgcgcccagaggcgtgccggccagcggcggggggcgcagtgcacacgagggggctggacttcgcctgtgatatctacatctgggcgcccttggccgggacttgtggggtccttctcctgtcactggttatcaccctttactgctgataa

SEQ ID NO: 747 - protein, 347 aa, Artificial Sequence
  CKS17-8aHTM_eGFP_aa
MALPVTALLLPLALLLHAARPLQNRRGLDLLFLKEGGLCTTTPAPRPPTPAPTIASQPLSLRPEACRPAAGGAVHTRGLDFACDIYIWAPLAGTCGVLLLSLVITLYCMVSKGEELFTGVVPILVELDGDVNGHKFSVSGEGEGDATYGKLTLKFICTTGKLPVPWPTLVTTLTYGVQCFSRYPDHMKQHDFFKSAMPEGYVQERTIFFKDDGNYKTRAEVKFEGDTLVNRIELKGIDFKEDGNILGHKLEYNYNSHNVYIMADKQKNGIKVNFKIRHNIEDGSVQLADHYQQNTPIGDGPVLLPDNHYLSTQSALSKDPNEKRDHMVLLEFVTAAGITLGMDELYK

SEQ ID NO: 748 - DNA, 1047 bp, Artificial Sequence
  CKS17-8aHTM_eGFP_NT
atggcactccccgtaactgctctgctgctgccgttggcattgctcctgcacgccgcacgcccgctgcaaaacagaaggggattagacctgctttttcttaaagagggagggctctgcaccacgacgccagcgccgcgaccaccaacaccggcgcccaccatcgcgtcgcagcccctgtccctgcgcccagaggcgtgccggccagcggcggggggcgcagtgcacacgagggggctggacttcgcctgtgatatctacatctgggcgcccttggccgggacttgtggggtccttctcctgtcactggttatcaccctttactgcatggtgagcaagggcgaggagctgttcaccggggtggtgcccatcctggtcgagctggacggcgacgtaaacggccacaagttcagcgtgtccggcgagggcgagggcgatgccacctacggcaagctgaccctgaagttcatctgcaccaccggcaagctgcccgtgccctggcccaccctcgtgaccaccctgacctacggcgtgcagtgcttcagccgctaccccgaccacatgaagcagcacgacttcttcaagtccgccatgcccgaaggctacgtccaggagcgcaccatcttcttcaaggacgacggcaactacaagacccgcgccgaggtgaagttcgagggcgacaccctggtgaaccgcatcgagctgaagggcatcgacttcaaggaggacggcaacatcctggggcacaagctggagtacaactacaacagccacaacgtctatatcatggccgacaagcagaagaacggcatcaaggtgaacttcaagatccgccacaacatcgaggacggcagcgtgcagctcgccgaccactaccagcagaacacccccatcggcgacggccccgtgctgctgcccgacaaccactacctgagcacccagtccgccctgagcaaagaccccaacgagaagcgcgatcacatggtcctgctggagttcgtgaccgccgccgggatcactctcggcatggacgagctgtacaagtgataa

SEQ ID NO: 749 - protein, 108 aa, Artificial Sequence
  CKS17-8aHTM_aa_noGFP
MALPVTALLLPLALLLHAARPLQNRRGLDLLFLKEGGLCTTTPAPRPPTPAPTIASQPLSLRPEACRPAAGGAVHTRGLDFACDIYIWAPLAGTCGVLLLSLVITLYC

SEQ ID NO: 750 - DNA, 324 bp, Artificial Sequence
  CKS17-8aHTM_NT_no GFP
atggcactccccgtaactgctctgctgctgccgttggcattgctcctgcacgccgcacgcccgctgcaaaacagaaggggattagacctgctttttcttaaagagggagggctctgcaccacgacgccagcgccgcgaccaccaacaccggcgcccaccatcgcgtcgcagcccctgtccctgcgcccagaggcgtgccggccagcggcggggggcgcagtgcacacgagggggctggacttcgcctgtgatatctacatctgggcgcccttggccgggacttgtggggtccttctcctgtcactggttatcaccctttactgc

SEQ ID NO: 751 - protein, 553 aa, Artificial Sequence
  CD47-eGFP_aa
MALPVTALLLPLALLLHAARPMWPLVAALLLGSACCGSAQLLFNKTKSVEFTFCNDTVVIPCFVTNMEAQNTTEVYVKWKFKGRDIYTFDGALNKSTVPTDFSSAKIEVSQLLKGDASLKMDKSDAVSHTGNYTCEVTELTREGETIIELKYRVVSWFSPNENILIVIFPIFAILLFWGQFGIKTLKYRSGGMDEKTIALLVAGLVITVIVIVGAILFVPGEYSLKNATGLGLIVTSTGILILLHYYVFSTAIGLTSFVIAILVIQVIAYILAVVGLSLCIAACIPMHGPLLISGLSILALAQLLGLVYMKFVEMVSKGEELFTGVVPILVELDGDVNGHKFSVSGEGEGDATYGKLTLKFICTTGKLPVPWPTLVTTLTYGVQCFSRYPDHMKQHDFFKSAMPEGYVQERTIFFKDDGNYKTRAEVKFEGDTLVNRIELKGIDFKEDGNILGHKLEYNYNSHNVYIMADKQKNGIKVNFKIRHNIEDGSVQLADHYQQNTPIGDGPVLLPDNHYLSTQSALSKDPNEKRDHMVLLEFVTAAGITLGMDELYK

SEQ ID NO: 752 - DNA, 1665 bp, Artificial Sequence
  CD47-eGFP
atggcactccccgtaactgctctgctgctgccgttggcattgctcctgcacgccgcacgcccgatgtggcccctggtagcggcgctgttgctgggctcggcgtgctgcggatcagctcagctactatttaataaaacaaaatctgtagaattcacgttttgtaatgacactgtcgtcattccatgctttgttactaatatggaggcacaaaacactactgaagtatacgtaaagtggaaatttaaaggaagagatatttacacctttgatggagctctaaacaagtccactgtccccactgactttagtagtgcaaaaattgaagtctcacaattactaaaaggagatgcctctttgaagatggataagagtgatgctgtctcacacacaggaaactacacttgtgaagtaacagaattaaccagagaaggtgaaacgatcatcgagctaaaatatcgtgttgtttcatggttttctccaaatgaaaatattcttattgttattttcccaatttttgctatactcctgttctggggacagtttggtattaaaacacttaaatatagatccggtggtatggatgagaaaacaattgctttacttgttgctggactagtgatcactgtcattgtcattgttggagccattcttttcgtcccaggtgaatattcattaaagaatgctactggccttggtttaattgtgacttctacagggatattaatattacttcactactatgtgtttagtacagcgattggattaacctccttcgtcattgccatattggttattcaggtgatagcctatatcctcgctgtggttggactgagtctctgtattgcggcgtgtataccaatgcatggccctcttctgatttcaggtttgagtatcttagctctagcacaattacttggactagtttatatgaaatttgtggaaatggtgagcaagggcgaggagctgttcaccggggtggtgcccatcctggtcgagctggacggcgacgtaaacggccacaagttcagcgtgtccggcgagggcgagggcgatgccacctacggcaagctgaccctgaagttcatctgcaccaccggcaagctgcccgtgccctggcccaccctcgtgaccaccctgacctacggcgtgcagtgcttcagccgctaccccgaccacatgaagcagcacgacttcttcaagtccgccatgcccgaaggctacgtccaggagcgcaccatcttcttcaaggacgacggcaactacaagacccgcgccgaggtgaagttcgagggcgacaccctggtgaaccgcatcgagctgaagggcatcgacttcaaggaggacggcaacatcctggggcacaagctggagtacaactacaacagccacaacgtctatatcatggccgacaagcagaagaacggcatcaaggtgaacttcaagatccgccacaacatcgaggacggcagcgtgcagctcgccgaccactaccagcagaacacccccatcggcgacggccccgtgctgctgcccgacaaccactacctgagcacccagtccgccctgagcaaagaccccaacgagaagcgcgatcacatggtcctgctggagttcgtgaccgccgccgggatcactctcggcatggacgagctgtacaagtgataa

SEQ ID NO: 753 - protein, 553 aa, Artificial Sequence; identical to SEQ ID NO: 751
  CD47-_aa_no_GGFP

SEQ ID NO: 754 - DNA, 1665 bp, Artificial Sequence; identical to SEQ ID NO: 752
  CD47-NT_no_GFP

SEQ ID NO: 755 - protein, 476 aa, Artificial Sequence
  fGP41_HIVtm_sfGFP_aa
MALPVTALLLPLALLLHAARPAVGIGALFLGFLGAAGSTMGAASMTLTVQARQLLSGIVQQQNNLLRAIEAQQHLLQLTVWGIKQLQARILAVERYLKDQQLLGIWGCSGKLICTTAVPWNASWSNKSLEQIWNHTTWMEWDREINNYTSLIHSLIEESQNQQEKNEQELLELDKWASLWNWFNITNWLWYIKLFIMIVGGLVGLRIVFAVLSIVNGGGGSGGGGSGGGGSGGGGSGSMRKGEELFTGVVPILVELDGDVNGHKFSVRGEGEGDATNGKLTLKFICTTGKLPVPWPTLVTTLTYGVQCFARYPDHMKQHDFFKSAMPEGYVQERTISFKDDGTYKTRAEVKFEGDTLVNRIELKGIDFKEDGNILGHKLEYNFNSHNVYITADKQKNGIKANFKIRHNVEDGSVQLADHYQQNTPIGDGPVLLPDNHYLSTQSVLSKDPNEKRDHMVLLEFVTAAGITHGMDELYK

SEQ ID NO: 756 - DNA, 1434 bp, Artificial Sequence
  fGP41_HIVtm_sfGFP
atggcactccccgtaactgctctgctgctgccgttggcattgctcctgcacgccgcacgcccggcagtgggaataggagctttgttccttgggttcttgggagcagcaggaagcactatgggcgcagcctcaatgacgctgacggtacaggccagacaattattgtctggtatagtgcagcagcagaacaatttgctgagggctattgaggcgcaacagcatctgttgcaactcacagtctggggcatcaagcagctccaggcaagaatcctggctgtggaaagatacctaaaggatcaacagctcctggggatttggggttgctctggaaaactcatttgcaccactgctgtgccttggaatgctagttggagtaataaatctctggaacagatttggaatcacacgacctggatggagtgggacagagaaattaacaattacacaagcttaatacactccttaattgaagaatcgcaaaaccagcaagaaaagaatgaacaagaattattggaattagataaatgggcaagtttgtggaattggtttaacataacaaattggctgtggtatataaaattattcataatgatagtaggaggcttggtaggtttaagaatagtttttgctgtactttctatagtgaatggtggtggcggttctggtggtggcggtagtggcggcggaggaagcggtggtggcggttccggatctatgcgtaaaggcgaagagctgttcactggtgtcgtccctattctggtggaactggatggtgatgtcaacggtcataagttttccgtgcgtggcgagggtgaaggtgacgcaactaatggtaaactgacgctgaagttcatctgtactactggtaaactgccggtaccttggccgactctggtaacgacgctgacttatggtgttcagtgctttgctcgttatccggaccatatgaagcagcatgacttcttcaagtccgccatgccggaaggctatgtgcaggaacgcacgatttcctttaaggatgacggcacgtacaaaacgcgtgcggaagtgaaatttgaaggcgataccctggtaaaccgcattgagctgaaaggcattgactttaaagaagacggcaatatcctgggccataagctggaatacaattttaacagccacaatgtttacatcaccgccgataaacaaaaaaatggcattaaagcgaattttaaaattcgccacaacgtggaggatggcagcgtgcagctggctgatcactaccagcaaaacactccaatcggtgatggtcctgttctgctgccagacaatcactatctgagcacgcaaagcgttctgtctaaagatccgaacgagaaacgcgatcatatggttctgctggagttcgtaaccgcagcgggcatcacgcatggtatggatgaactgtacaaatgataa

SEQ ID NO: 757 - protein, 216 aa, Artificial Sequence
  fGP41_HIVtm_aa_no_GFP
MALPVTALLLPLALLLHAARPAVGIGALFLGFLGAAGSTMGAASMTLTVQARQLLSGIVQQQNNLLRAIEAQQHLLQLTVWGIKQLQARILAVERYLKDQQLLGIWGCSGKLICTTAVPWNASWSNKSLEQIWNHTTWMEWDREINNYTSLIHSLIEESQNQQEKNEQELLELDKWASLWNWFNITNWLWYIKLFIMIVGGLVGLRIVFAVLSIVN

SEQ ID NO: 758 - DNA, 648 bp, Artificial Sequence
  fGP41_HIVtm_NT_no_GFP
atggcactccccgtaactgctctgctgctgccgttggcattgctcctgcacgccgcacgcccggcagtgggaataggagctttgttccttgggttcttgggagcagcaggaagcactatgggcgcagcctcaatgacgctgacggtacaggccagacaattattgtctggtatagtgcagcagcagaacaatttgctgagggctattgaggcgcaacagcatctgttgcaactcacagtctggggcatcaagcagctccaggcaagaatcctggctgtggaaagatacctaaaggatcaacagctcctggggatttggggttgctctggaaaactcatttgcaccactgctgtgccttggaatgctagttggagtaataaatctctggaacagatttggaatcacacgacctggatggagtgggacagagaaattaacaattacacaagcttaatacactccttaattgaagaatcgcaaaaccagcaagaaaagaatgaacaagaattattggaattagataaatgggcaagtttgtggaattggtttaacataacaaattggctgtggtatataaaattattcataatgatagtaggaggcttggtaggtttaagaatagtttttgctgtactttctatagtgaat

SEQ ID NO: 759 - protein, 445 aa, Artificial Sequence
  p15Etm_sfGFP_aa
MALPVTALLLPLALLLHAARPEPVSLTLALLLGGLTMGGIAAGVGTGTTALVATQQFQQLQAAVHNDLKEVEKSITNLEKSLTSLSEVVLQNRRGLDLLFLKEGGLCAALKEECCFYADHTGLVRDSMAKLRERLSQRQKLFESQQGWFEGLFNKSPWFTTLISTIMGPLIILLLILLFGPCILNGGGGSGGGGSGGGGSGGGGSGSMRKGEELFTGVVPILVELDGDVNGHKFSVRGEGEGDATNGKLTLKFICTTGKLPVPWPTLVTTLTYGVQCFARYPDHMKQHDFFKSAMPEGYVQERTISFKDDGTYKTRAEVKFEGDTLVNRIELKGIDFKEDGNILGHKLEYNFNSHNVYITADKQKNGIKANFKIRHNVEDGSVQLADHYQQNTPIGDGPVLLPDNHYLSTQSVLSKDPNEKRDHMVLLEFVTAAGITHGMDELYK

SEQ ID NO: 760 - DNA, 1341 bp, Artificial Sequence
  p15Etm_sfGFP
atggcactccccgtaactgctctgctgctgccgttggcattgctcctgcacgccgcacgcccggagccggtgtcattaaccttggccctgctgttgggaggacttactatgggcggcatagctgcaggagtaggaaccgggactacagccctagtggccactcagcagttccaacaactccaggctgccgtgcacaatgaccttaaagaagttgaaaagtccatcactaatctagaaaaatctttgacctccttgtccgaagtagtgttgcagaatcgtagaggcctagatctactattcctaaaagagggaggtttgtgtgctgccttaaaagaagaatgctgtttctatgccgaccacacaggattggtacgggatagcatggccaaacttagggaaagattgagtcagagacaaaagctctttgaatcccaacaagggtggtttgaagggctgtttaataagtccccttggttcaccaccctgatatccaccatcatgggtcccctgataatcctcttgttaattttactctttgggccttgtattctcaatggtggtggcggttctggtggtggcggtagtggcggcggaggaagcggtggtggcggttccggatctatgcgtaaaggcgaagagctgttcactggtgtcgtccctattctggtggaactggatggtgatgtcaacggtcataagttttccgtgcgtggcgagggtgaaggtgacgcaactaatggtaaactgacgctgaagttcatctgtactactggtaaactgccggtaccttggccgactctggtaacgacgctgacttatggtgttcagtgctttgctcgttatccggaccatatgaagcagcatgacttcttcaagtccgccatgccggaaggctatgtgcaggaacgcacgatttcctttaaggatgacggcacgtacaaaacgcgtgcggaagtgaaatttgaaggcgataccctggtaaaccgcattgagctgaaaggcattgactttaaagaagacggcaatatcctgggccataagctggaatacaattttaacagccacaatgtttacatcaccgccgataaacaaaaaaatggcattaaagcgaattttaaaattcgccacaacgtggaggatggcagcgtgcagctggctgatcactaccagcaaaacactccaatcggtgatggtcctgttctgctgccagacaatcactatctgagcacgcaaagcgttctgtctaaagatccgaacgagaaacgcgatcatatggttctgctggagttcgtaaccgcagcgggcatcacgcatggtatggatgaactgtacaaatgataa

SEQ ID NO: 761 - protein, 185 aa, Artificial Sequence
  p15Etm_aa_no_GFP
MALPVTALLLPLALLLHAARPEPVSLTLALLLGGLTMGGIAAGVGTGTTALVATQQFQQLQAAVHNDLKEVEKSITNLEKSLTSLSEVVLQNRRGLDLLFLKEGGLCAALKEECCFYADHTGLVRDSMAKLRERLSQRQKLFESQQGWFEGLFNKSPWFTTLISTIMGPLIILLLILLFGPCILN

SEQ ID NO: 762 - DNA, 555 bp, Artificial Sequence
  p15Etm_NT_noGFP
atggcactccccgtaactgctctgctgctgccgttggcattgctcctgcacgccgcacgcccggagccggtgtcattaaccttggccctgctgttgggaggacttactatgggcggcatagctgcaggagtaggaaccgggactacagccctagtggccactcagcagttccaacaactccaggctgccgtgcacaatgaccttaaagaagttgaaaagtccatcactaatctagaaaaatctttgacctccttgtccgaagtagtgttgcagaatcgtagaggcctagatctactattcctaaaagagggaggtttgtgtgctgccttaaaagaagaatgctgtttctatgccgaccacacaggattggtacgggatagcatggccaaacttagggaaagattgagtcagagacaaaagctctttgaatcccaacaagggtggtttgaagggctgtttaataagtccccttggttcaccaccctgatatccaccatcatgggtcccctgataatcctcttgttaattttactctttgggccttgtattctcaat

SEQ ID NO: 763 - protein, 558 aa, Artificial Sequence
  CD43_TM_sfGFP_aa
MALPVTALLLPLALLLHAARPMATLLLLLGVLVVSPDALGSTTAVQTPTSGEPLVSTSEPLSSKMYTTSITSDPKADSTGDQTSALPPSTSINEGSPLWTSIGASTGSPLPEPTTYQEVSIKMSSVPQETPHATSHPAVPITANSLGSHTVTGGTITTNSPETSSRTSGAPVTTAASSLETSRGTSGPPLTMATVSLETSKGTSGPPVTMATDSLETSTGTTGPPVTMTTGSLEPSSGASGPQVSSVKLSTMMSPTTSTNASTVPFRNPDENSRGMLPVAVLVALLAVIVLVALLLLWGGGGSGGGGSGGGGSGGGGSGSMRKGEELFTGVVPILVELDGDVNGHKFSVRGEGEGDATNGKLTLKFICTTGKLPVPWPTLVTTLTYGVQCFARYPDHMKQHDFFKSAMPEGYVQERTISFKDDGTYKTRAEVKFEGDTLVNRIELKGIDFKEDGNILGHKLEYNFNSHNVYITADKQKNGIKANFKIRHNVEDGSVQLADHYQQNTPIGDGPVLLPDNHYLSTQSVLSKDPNEKRDHMVLLEFVTAAGITHGMDELYK

SEQ ID NO: 764 - DNA, 1680 bp, Artificial Sequence
  CD43_TM_sfGFP
atggcactccccgtaactgctctgctgctgccgttggcattgctcctgcacgccgcacgcccgatggccacgcttctccttctccttggggtgctggtggtaagcccagacgctctggggagcacaacagcagtgcagacacccacctccggagagcctttggtctctactagcgagcccctgagctcaaagatgtacaccacttcaataacaagtgaccctaaggccgacagcactggggaccagacctcagccctacctccctcaacttccatcaatgagggatcccctctttggacttccattggtgccagcactggttcccctttacctgagccaacaacctaccaggaagtttccatcaagatgtcatcagtgccccaggaaacccctcatgcaaccagtcatcctgctgttcccataacagcaaactctctaggatcccacaccgtgacaggtggaaccataacaacgaactctccagaaacctccagtaggaccagtggagcccctgttaccacggcagctagctctctggagacctccagaggcacctctggaccccctcttaccatggcaactgtctctctggagacttccaaaggcacctctggaccccctgttaccatggcaactgactctctggagacctccactgggaccactggaccccctgttaccatgacaactggctctctggagccctccagcggggccagtggaccccaggtctctagcgtaaaactatctacaatgatgtctccaacgacctccaccaacgcaagcactgtgcccttccggaacccagatgagaactcacgaggcatgctgccagtggctgtgcttgtggccctgctggcggtcatagtcctcgtggctctgctcctgctgtggggtggtggcggttctggtggtggcggtagtggcggcggaggaagcggtggtggcggttccggatctatgcgtaaaggcgaagagctgttcactggtgtcgtccctattctggtggaactggatggtgatgtcaacggtcataagttttccgtgcgtggcgagggtgaaggtgacgcaactaatggtaaactgacgctgaagttcatctgtactactggtaaactgccggtaccttggccgactctggtaacgacgctgacttatggtgttcagtgctttgctcgttatccggaccatatgaagcagcatgacttcttcaagtccgccatgccggaaggctatgtgcaggaacgcacgatttcctttaaggatgacggcacgtacaaaacgcgtgcggaagtgaaatttgaaggcgataccctggtaaaccgcattgagctgaaaggcattgactttaaagaagacggcaatatcctgggccataagctggaatacaattttaacagccacaatgtttacatcaccgccgataaacaaaaaaatggcattaaagcgaattttaaaattcgccacaacgtggaggatggcagcgtgcagctggctgatcactaccagcaaaacactccaatcggtgatggtcctgttctgctgccagacaatcactatctgagcacgcaaagcgttctgtctaaagatccgaacgagaaacgcgatcatatggttctgctggagttcgtaaccgcagcgggcatcacgcatggtatggatgaactgtacaaatgataa

SEQ ID NO: 765 - protein, 298 aa, Artificial Sequence
  CD43_TM_aa_No_GFP
MALPVTALLLPLALLLHAARPMATLLLLLGVLVVSPDALGSTTAVQTPTSGEPLVSTSEPLSSKMYTTSITSDPKADSTGDQTSALPPSTSINEGSPLWTSIGASTGSPLPEPTTYQEVSIKMSSVPQETPHATSHPAVPITANSLGSHTVTGGTITTNSPETSSRTSGAPVTTAASSLETSRGTSGPPLTMATVSLETSKGTSGPPVTMATDSLETSTGTTGPPVTMTTGSLEPSSGASGPQVSSVKLSTMMSPTTSTNASTVPFRNPDENSRGMLPVAVLVALLAVIVLVALLLLW

SEQ ID NO: 766 - DNA, 894 bp, Artificial Sequence
  CD43_TM_NT_no_GFP
atggcactccccgtaactgctctgctgctgccgttggcattgctcctgcacgccgcacgcccgatggccacgcttctccttctccttggggtgctggtggtaagcccagacgctctggggagcacaacagcagtgcagacacccacctccggagagcctttggtctctactagcgagcccctgagctcaaagatgtacaccacttcaataacaagtgaccctaaggccgacagcactggggaccagacctcagccctacctccctcaacttccatcaatgagggatcccctctttggacttccattggtgccagcactggttcccctttacctgagccaacaacctaccaggaagtttccatcaagatgtcatcagtgccccaggaaacccctcatgcaaccagtcatcctgctgttcccataacagcaaactctctaggatcccacaccgtgacaggtggaaccataacaacgaactctccagaaacctccagtaggaccagtggagcccctgttaccacggcagctagctctctggagacctccagaggcacctctggaccccctcttaccatggcaactgtctctctggagacttccaaaggcacctctggaccccctgttaccatggcaactgactctctggagacctccactgggaccactggaccccctgttaccatgacaactggctctctggagccctccagcggggccagtggaccccaggtctctagcgtaaaactatctacaatgatgtctccaacgacctccaccaacgcaagcactgtgcccttccggaacccagatgagaactcacgaggcatgctgccagtggctgtgcttgtggccctgctggcggtcatagtcctcgtggctctgctcctgctgtgg

SEQ ID NO: 767 - protein, 468 aa, Artificial Sequence
  LMP1_TM-sfGFP_aa
MALPVTALLLPLALLLHAARPMERDLERGPPGPPRPPLGPPLSSSIGLALLLLLLALLFWLYIVMSNWTGGALLVLYSFALMLIIIILIIFIFRRDLLCPLGGLGLLLLMITLLLIALWNLHGQALYLGIVLFIFGCLLVLGLWIYFLEILWRLGATIWQLLAFILAFFLAIILLIIALYLQQNWWTLLVDLLWLLLFMAILIWMYYHGGGGSGGGGSGGGGSGGGGSGSMRKGEELFTGVVPILVELDGDVNGHKFSVRGEGEGDATNGKLTLKFICTTGKLPVPWPTLVTTLTYGVQCFARYPDHMKQHDFFKSAMPEGYVQERTISFKDDGTYKTRAEVKFEGDTLVNRIELKGIDFKEDGNILGHKLEYNFNSHNVYITADKQKNGIKANFKIRHNVEDGSVQLADHYQQNTPIGDGPVLLPDNHYLSTQSVLSKDPNEKRDHMVLLEFVTAAGITHGMDELYK

SEQ ID NO: 768 - DNA, 1410 bp, Artificial Sequence
  LMP1_TM-sfGFP
atggcactccccgtaactgctctgctgctgccgttggcattgctcctgcacgccgcacgcccgatggaacgcgaccttgagaggggcccaccgggcccgccacggccccctctaggaccccccctctcctcttccataggccttgctctccttctcctgctcttggcgctactgttctggctgtatatcgttatgagtaactggactggaggagcgctccttgtcctctattcctttgctctcatgcttattattatcattctcatcatctttatcttcagaagagaccttctctgtccacttggaggccttggtctactcctactgatgatcaccctcctactcatcgctctctggaatttgcacggacaggcattgtaccttggaattgtgctgttcatctttggctgcttacttgtcttaggtctctggatctacttcttggagattctctggcggcttggtgccaccatctggcagcttttggccttcatcctagccttcttcctagccatcatcctgcttattattgctctctatctacaacaaaactggtggactctattggttgatctcctttggctcctcctgtttatggccattttaatctggatgtattatcatggtggtggcggttctggtggtggcggtagtggcggcggaggaagcggtggtggcggttccggatctatgcgtaaaggcgaagagctgttcactggtgtcgtccctattctggtggaactggatggtgatgtcaacggtcataagttttccgtgcgtggcgagggtgaaggtgacgcaactaatggtaaactgacgctgaagttcatctgtactactggtaaactgccggtaccttggccgactctggtaacgacgctgacttatggtgttcagtgctttgctcgttatccggaccatatgaagcagcatgacttcttcaagtccgccatgccggaaggctatgtgcaggaacgcacgatttcctttaaggatgacggcacgtacaaaacgcgtgcggaagtgaaatttgaaggcgataccctggtaaaccgcattgagctgaaaggcattgactttaaagaagacggcaatatcctgggccataagctggaatacaattttaacagccacaatgtttacatcaccgccgataaacaaaaaaatggcattaaagcgaattttaaaattcgccacaacgtggaggatggcagcgtgcagctggctgatcactaccagcaaaacactccaatcggtgatggtcctgttctgctgccagacaatcactatctgagcacgcaaagcgttctgtctaaagatccgaacgagaaacgcgatcatatggttctgctggagttcgtaaccgcagcgggcatcacgcatggtatggatgaactgtacaaatgataa

SEQ ID NO: 769 - protein, 208 aa, Artificial Sequence
  LMP1_TM_aa_no_GFP
MALPVTALLLPLALLLHAARPMERDLERGPPGPPRPPLGPPLSSSIGLALLLLLLALLFWLYIVMSNWTGGALLVLYSFALMLIIIILIIFIFRRDLLCPLGGLGLLLLMITLLLIALWNLHGQALYLGIVLFIFGCLLVLGLWIYFLEILWRLGATIWQLLAFILAFFLAIILLIIALYLQQNWWTLLVDLLWLLLFMAILIWMYYH

SEQ ID NO: 770 - DNA, 624 bp, Artificial Sequence
  LMP1_TM-NT_No-GFP
atggcactccccgtaactgctctgctgctgccgttggcattgctcctgcacgccgcacgcccgatggaacgcgaccttgagaggggcccaccgggcccgccacggccccctctaggaccccccctctcctcttccataggccttgctctccttctcctgctcttggcgctactgttctggctgtatatcgttatgagtaactggactggaggagcgctccttgtcctctattcctttgctctcatgcttattattatcattctcatcatctttatcttcagaagagaccttctctgtccacttggaggccttggtctactcctactgatgatcaccctcctactcatcgctctctggaatttgcacggacaggcattgtaccttggaattgtgctgttcatctttggctgcttacttgtcttaggtctctggatctacttcttggagattctctggcggcttggtgccaccatctggcagcttttggccttcatcctagccttcttcctagccatcatcctgcttattattgctctctatctacaacaaaactggtggactctattggttgatctcctttggctcctcctgtttatggccattttaatctggatgtattatcat

SEQ ID NO: 771 - protein, 681 aa, Artificial Sequence
  fgD_TM_sfGFP_aa
MALPVTALLLPLALLLHAARPMLLAALLAALVARTTLGADVDAVPAPTFPPPAYPYTESWQLTLTTVPSPFVGPADVYHTRPLEDPCGVVALISDPQVDRLLNEAVAHRRPTYRAHVAWYRIADGCAHLLYFIEYADCDPRQIFGRCRRRTTPMWWTPSADYMFPTEDELGLLMVAPGRFNEGQYRRLVSVDGVNILTDFMVALPEGQECPFARVDQHRTYKFGACWNDESFRRGVDVMRFLTPFYQQPPHREVVNYWYRKNGRTLPRAYAAATPYAIDPARPSAGSPRPRPRPRPRPKPEPAPVTPAPPGRLPEPATRDHAAGGHPTPRPPRPETPHRPFAPPAVVPSGWPQPAEPFQPRTPAAPGVSRHRSVIVGTGTAMGALLVGVCVYIFFRLRGAKGYRLLGGPADTDELKAQPGPGGGGSGGGGSGGGGSGGGGSGSMRKGEELFTGVVPILVELDGDVNGHKFSVRGEGEGDATNGKLTLKFICTTGKLPVPWPTLVTTLTYGVQCFARYPDHMKQHDFFKSAMPEGYVQERTISFKDDGTYKTRAEVKFEGDTLVNRIELKGIDFKEDGNILGHKLEYNFNSHNVYITADKQKNGIKANFKIRHNVEDGSVQLADHYQQNTPIGDGPVLLPDNHYLSTQSVLSKDPNEKRDHMVLLEFVTAAGITHGMDELYK

SEQ ID NO: 772 - DNA, 2049 bp, Artificial Sequence
  fgD_TM_sfGFP
atggcactccccgtaactgctctgctgctgccgttggcattgctcctgcacgccgcacgcccgatgctgctcgcagcgctattggcggcgctggtcgcccggacgacgctcggcgcggacgtggacgccgtgcccgcgccgaccttccccccgcccgcgtacccgtacaccgagtcgtggcagctgacgctgacgacggtcccctcgcccttcgtcggccccgcggacgtctaccacacgcgcccgctggaggacccgtgcggggtggtggcgctgatctccgacccgcaggtggaccggctgctgaacgaggcggtggcccaccggcggcccacgtaccgcgcccacgtggcctggtaccgcatcgcggacgggtgcgcgcacctgctgtactttatcgagtacgccgactgcgaccccaggcagatctttgggcgctgccggcgccgcaccacgccgatgtggtggaccccgtccgcggactacatgttccccacggaggacgagctggggctgctcatggtggctccggggcggttcaacgagggccagtaccggcgcctggtgtccgtcgacggcgtgaacatcctcaccgacttcatggtggcgctccccgaggggcaagagtgcccgttcgcccgcgtggaccagcaccgcacgtacaagttcggcgcgtgctggaacgacgagagcttcaggcggggcgtggacgtgatgcgattcctgacgccgttctaccagcagcccccgcaccgggaggtggtgaactactggtaccgcaagaacggccggacgctcccgcgggcctacgccgccgccacgccgtacgccatcgaccccgcgcggccctcggcgggctcgccgaggcccaggccccggccccggccccggccgaagcccgagcccgccccggtgacgcccgcgccccccggccgcctgcccgagccggcgacgcgggaccacgccgccgggggccaccccacgccgcgacccccgaggcccgagacgccgcaccgccccttcgccccgccggccgtcgtgcccagcgggtggccgcagcccgcggagccgttccagccgcggacccccgccgcgccgggcgtctcgcgccaccgctcggtgatcgtcggcacgggcaccgcgatgggcgcgctcctggtgggcgtgtgcgtctacatcttcttccgcctgaggggggcgaaggggtatcgcctcctgggcggtcccgcggacaccgacgagctaaaagcgcagcccggtccgggtggtggcggttctggtggtggcggtagtggcggcggaggaagcggtggtggcggttccggatctatgcgtaaaggcgaagagctgttcactggtgtcgtccctattctggtggaactggatggtgatgtcaacggtcataagttttccgtgcgtggcgagggtgaaggtgacgcaactaatggtaaactgacgctgaagttcatctgtactactggtaaactgccggtaccttggccgactctggtaacgacgctgacttatggtgttcagtgctttgctcgttatccggaccatatgaagcagcatgacttcttcaagtccgccatgccggaaggctatgtgcaggaacgcacgatttcctttaaggatgacggcacgtacaaaacgcgtgcggaagtgaaatttgaaggcgataccctggtaaaccgcattgagctgaaaggcattgactttaaagaagacggcaatatcctgggccataagctggaatacaattttaacagccacaatgtttacatcaccgccgataaacaaaaaaatggcattaaagcgaattttaaaattcgccacaacgtggaggatggcagcgtgcagctggctgatcactaccagcaaaacactccaatcggtgatggtcctgttctgctgccagacaatcactatctgagcacgcaaagcgttctgtctaaagatccgaacgagaaacgcgatcatatggttctgctggagttcgtaaccgcagcgggcatcacgcatggtatggatgaactgtacaaatgataa

SEQ ID NO: 773 - protein, 421 aa, Artificial Sequence
  fgD_TM_AA-NO_GFP
MALPVTALLLPLALLLHAARPMLLAALLAALVARTTLGADVDAVPAPTFPPPAYPYTESWQLTLTTVPSPFVGPADVYHTRPLEDPCGVVALISDPQVDRLLNEAVAHRRPTYRAHVAWYRIADGCAHLLYFIEYADCDPRQIFGRCRRRTTPMWWTPSADYMFPTEDELGLLMVAPGRFNEGQYRRLVSVDGVNILTDFMVALPEGQECPFARVDQHRTYKFGACWNDESFRRGVDVMRFLTPFYQQPPHREVVNYWYRKNGRTLPRAYAAATPYAIDPARPSAGSPRPRPRPRPRPKPEPAPVTPAPPGRLPEPATRDHAAGGHPTPRPPRPETPHRPFAPPAVVPSGWPQPAEPFQPRTPAAPGVSRHRSVIVGTGTAMGALLVGVCVYIFFRLRGAKGYRLLGGPADTDELKAQPGP

SEQ ID NO: 774 - DNA, 1263 bp, Artificial Sequence
  fgD_TM__NT_NO_GFP
atggcactccccgtaactgctctgctgctgccgttggcattgctcctgcacgccgcacgcccgatgctgctcgcagcgctattggcggcgctggtcgcccggacgacgctcggcgcggacgtggacgccgtgcccgcgccgaccttccccccgcccgcgtacccgtacaccgagtcgtggcagctgacgctgacgacggtcccctcgcccttcgtcggccccgcggacgtctaccacacgcgcccgctggaggacccgtgcggggtggtggcgctgatctccgacccgcaggtggaccggctgctgaacgaggcggtggcccaccggcggcccacgtaccgcgcccacgtggcctggtaccgcatcgcggacgggtgcgcgcacctgctgtactttatcgagtacgccgactgcgaccccaggcagatctttgggcgctgccggcgccgcaccacgccgatgtggtggaccccgtccgcggactacatgttccccacggaggacgagctggggctgctcatggtggctccggggcggttcaacgagggccagtaccggcgcctggtgtccgtcgacggcgtgaacatcctcaccgacttcatggtggcgctccccgaggggcaagagtgcccgttcgcccgcgtggaccagcaccgcacgtacaagttcggcgcgtgctggaacgacgagagcttcaggcggggcgtggacgtgatgcgattcctgacgccgttctaccagcagcccccgcaccgggaggtggtgaactactggtaccgcaagaacggccggacgctcccgcgggcctacgccgccgccacgccgtacgccatcgaccccgcgcggccctcggcgggctcgccgaggcccaggccccggccccggccccggccgaagcccgagcccgccccggtgacgcccgcgccccccggccgcctgcccgagccggcgacgcgggaccacgccgccgggggccaccccacgccgcgacccccgaggcccgagacgccgcaccgccccttcgccccgccggccgtcgtgcccagcgggtggccgcagcccgcggagccgttccagccgcggacccccgccgcgccgggcgtctcgcgccaccgctcggtgatcgtcggcacgggcaccgcgatgggcgcgctcctggtgggcgtgtgcgtctacatcttcttccgcctgaggggggcgaaggggtatcgcctcctgggcggtcccgcggacaccgacgagctaaaagcgcagcccggtccg

SEQ ID NO: 775 - protein, 434 aa, Artificial Sequence
  fLLT1_TM-sfGFP_aa
MALPVTALLLPLALLLHAARPMRKGEELFTGVVPILVELDGDVNGHKFSVRGEGEGDATNGKLTLKFICTTGKLPVPWPTLVTTLTYGVQCFARYPDHMKQHDFFKSAMPEGYVQERTISFKDDGTYKTRAEVKFEGDTLVNRIELKGIDFKEDGNILGHKLEYNFNSHNVYITADKQKNGIKANFKIRHNVEDGSVQLADHYQQNTPIGDGPVLLPDNHYLSTQSVLSKDPNEKRDHMVLLEFVTAAGITHGMDELYKGGGGSGGGGSGGGGSGGGGSGSFFLIMFLTIIVCGMVAALSAIRANCHQEPSVCLQAACPESWIGFQRKCFYFSDDTKNWTSSQRFCDSQDADLAQVESFQELNFLLRYKGPSDHWIGLSREQGQPWKWINGTEWTRQFPILGAGECAYLNDKGASSARHYTERKWICSKSDIHV

SEQ ID NO: 776 - DNA, 1308 bp, Artificial Sequence
  fLLT1_TM-sfGFP
atggcactccccgtaactgctctgctgctgccgttggcattgctcctgcacgccgcacgcccgatgcgtaaaggcgaagagctgttcactggtgtcgtccctattctggtggaactggatggtgatgtcaacggtcataagttttccgtgcgtggcgagggtgaaggtgacgcaactaatggtaaactgacgctgaagttcatctgtactactggtaaactgccggtaccttggccgactctggtaacgacgctgacttatggtgttcagtgctttgctcgttatccggaccatatgaagcagcatgacttcttcaagtccgccatgccggaaggctatgtgcaggaacgcacgatttcctttaaggatgacggcacgtacaaaacgcgtgcggaagtgaaatttgaaggcgataccctggtaaaccgcattgagctgaaaggcattgactttaaagaagacggcaatatcctgggccataagctggaatacaattttaacagccacaatgtttacatcaccgccgataaacaaaaaaatggcattaaagcgaattttaaaattcgccacaacgtggaggatggcagcgtgcagctggctgatcactaccagcaaaacactccaatcggtgatggtcctgttctgctgccagacaatcactatctgagcacgcaaagcgttctgtctaaagatccgaacgagaaacgcgatcatatggttctgctggagttcgtaaccgcagcgggcatcacgcatggtatggatgaactgtacaaaggtggtggcggttctggtggtggcggtagtggcggcggaggaagcggtggtggcggttccggatcttttttcttaatcatgtttctgacaatcatagtgtgtggaatggttgctgctttaagcgcaataagagctaactgccatcaagagccatcagtatgtcttcaagctgcatgcccagaaagctggattggttttcaaagaaagtgtttctatttttctgatgacaccaagaactggacatcaagtcagaggttttgtgactcacaagatgctgatcttgctcaggttgaaagcttccaggaactgaatttcctgttgagatataaaggcccatctgatcactggattgggctgagcagagaacaaggccaaccatggaaatggataaatggtactgaatggacaagacagtttcctatcctgggagcaggagagtgtgcctatttgaatgacaaaggtgccagtagtgccaggcactacacagagaggaagtggatttgttccaaatcagatatacatgtctgataa

SEQ ID NO: 777 - protein, 174 aa, Artificial Sequence
  fLLT1_TM-_aa_No_GFP
MALPVTALLLPLALLLHAARPFFLIMFLTIIVCGMVAALSAIRANCHQEPSVCLQAACPESWIGFQRKCFYFSDDTKNWTSSQRFCDSQDADLAQVESFQELNFLLRYKGPSDHWIGLSREQGQPWKWINGTEWTRQFPILGAGECAYLNDKGASSARHYTERKWICSKSDIHV

SEQ ID NO: 778 - DNA, 528 bp, Artificial Sequence
  fLLT1_TM-NT_No_GFP
atggcactccccgtaactgctctgctgctgccgttggcattgctcctgcacgccgcacgcccgtttttcttaatcatgtttctgacaatcatagtgtgtggaatggttgctgctttaagcgcaataagagctaactgccatcaagagccatcagtatgtcttcaagctgcatgcccagaaagctggattggttttcaaagaaagtgtttctatttttctgatgacaccaagaactggacatcaagtcagaggttttgtgactcacaagatgctgatcttgctcaggttgaaagcttccaggaactgaatttcctgttgagatataaaggcccatctgatcactggattgggctgagcagagaacaaggccaaccatggaaatggataaatggtactgaatggacaagacagtttcctatcctgggagcaggagagtgtgcctatttgaatgacaaaggtgccagtagtgccaggcactacacagagaggaagtggatttgttccaaatcagatatacatgtctgataa

SEQ ID NO: 779 - protein, 443 aa, Artificial Sequence
  CD47tm162_sfGFP_aa
MALPVTALLLPLALLLHAARPMWPLVAALLLGSACCGSAQLLFNKTKSVEFTFCNDTVVIPCFVTNMEAQNTTEVYVKWKFKGRDIYTFDGALNKSTVPTDFSSAKIEVSQLLKGDASLKMDKSDAVSHTGNYTCEVTELTREGETIIELKYRVVSWFSPNENILIVIFPIFAILLFWGQFGIGGGGSGGGGSGGGGSGGGGSGSMRKGEELFTGVVPILVELDGDVNGHKFSVRGEGEGDATNGKLTLKFICTTGKLPVPWPTLVTTLTYGVQCFARYPDHMKQHDFFKSAMPEGYVQERTISFKDDGTYKTRAEVKFEGDTLVNRIELKGIDFKEDGNILGHKLEYNFNSHNVYITADKQKNGIKANFKIRHNVEDGSVQLADHYQQNTPIGDGPVLLPDNHYLSTQSVLSKDPNEKRDHMVLLEFVTAAGITHGMDELYK

SEQ ID NO: 780 - DNA, 1335 bp, Artificial Sequence
  CD47tm162_sfGFP
atggcactccccgtaactgctctgctgctgccgttggcattgctcctgcacgccgcacgcccgatgtggcccctggtagcggcgctgttgctgggctcggcgtgctgcggatcagctcagctactatttaataaaacaaaatctgtagaattcacgttttgtaatgacactgtcgtcattccatgctttgttactaatatggaggcacaaaacactactgaagtatacgtaaagtggaaatttaaaggaagagatatttacacctttgatggagctctaaacaagtccactgtccccactgactttagtagtgcaaaaattgaagtctcacaattactaaaaggagatgcctctttgaagatggataagagtgatgctgtctcacacacaggaaactacacttgtgaagtaacagaattaaccagagaaggtgaaacgatcatcgagctaaaatatcgtgttgtttcatggttttctccaaatgaaaatattcttattgttattttcccaatttttgctatactcctgttctggggacagtttggtattggtggtggcggttctggtggtggcggtagtggcggcggaggaagcggtggtggcggttccggatctatgcgtaaaggcgaagagctgttcactggtgtcgtccctattctggtggaactggatggtgatgtcaacggtcataagttttccgtgcgtggcgagggtgaaggtgacgcaactaatggtaaactgacgctgaagttcatctgtactactggtaaactgccggtaccttggccgactctggtaacgacgctgacttatggtgttcagtgctttgctcgttatccggaccatatgaagcagcatgacttcttcaagtccgccatgccggaaggctatgtgcaggaacgcacgatttcctttaaggatgacggcacgtacaaaacgcgtgcggaagtgaaatttgaaggcgataccctggtaaaccgcattgagctgaaaggcattgactttaaagaagacggcaatatcctgggccataagctggaatacaattttaacagccacaatgtttacatcaccgccgataaacaaaaaaatggcattaaagcgaattttaaaattcgccacaacgtggaggatggcagcgtgcagctggctgatcactaccagcaaaacactccaatcggtgatggtcctgttctgctgccagacaatcactatctgagcacgcaaagcgttctgtctaaagatccgaacgagaaacgcgatcatatggttctgctggagttcgtaaccgcagcgggcatcacgcatggtatggatgaactgtacaaatgataa

SEQ ID NO: 781 - protein, 183 aa, Artificial Sequence
  CD47tm162_aa_No_GFP
MALPVTALLLPLALLLHAARPMWPLVAALLLGSACCGSAQLLFNKTKSVEFTFCNDTVVIPCFVTNMEAQNTTEVYVKWKFKGRDIYTFDGALNKSTVPTDFSSAKIEVSQLLKGDASLKMDKSDAVSHTGNYTCEVTELTREGETIIELKYRVVSWFSPNENILIVIFPIFAILLFWGQFGI

SEQ ID NO: 782 - DNA, 549 bp, Artificial Sequence
  CD47tm162_NT_NoGFP
atggcactccccgtaactgctctgctgctgccgttggcattgctcctgcacgccgcacgcccgatgtggcccctggtagcggcgctgttgctgggctcggcgtgctgcggatcagctcagctactatttaataaaacaaaatctgtagaattcacgttttgtaatgacactgtcgtcattccatgctttgttactaatatggaggcacaaaacactactgaagtatacgtaaagtggaaatttaaaggaagagatatttacacctttgatggagctctaaacaagtccactgtccccactgactttagtagtgcaaaaattgaagtctcacaattactaaaaggagatgcctctttgaagatggataagagtgatgctgtctcacacacaggaaactacacttgtgaagtaacagaattaaccagagaaggtgaaacgatcatcgagctaaaatatcgtgttgtttcatggttttctccaaatgaaaatattcttattgttattttcccaatttttgctatactcctgttctggggacagtttggtatt

SEQ ID NO: 783 - protein, 382 aa, Artificial Sequence
  LMP_L-CD8HTM_sfGFP_aa
MALPVTALLLPLALLLHAARPLGLALLLLLLALLFWLYIVMSDWTGGALLVLYTTTPAPRPPTPAPTIASQPLSLRPEACRPAAGGAVHTRGLDFACDIYIWAPLAGTCGVLLLSLVITLYCGGGGSGGGGSGGGGSGGGGSGSMRKGEELFTGVVPILVELDGDVNGHKFSVRGEGEGDATNGKLTLKFICTTGKLPVPWPTLVTTLTYGVQCFARYPDHMKQHDFFKSAMPEGYVQERTISFKDDGTYKTRAEVKFEGDTLVNRIELKGIDFKEDGNILGHKLEYNFNSHNVYITADKQKNGIKANFKIRHNVEDGSVQLADHYQQNTPIGDGPVLLPDNHYLSTQSVLSKDPNEKRDHMVLLEFVTAAGITHGMDELYK

SEQ ID NO: 784 - DNA, 1152 bp, Artificial Sequence
  LMP_L-CD8HTM_sfGFP
atggcactccccgtaactgctctgctgctgccgttggcattgctcctgcacgccgcacgcccgcttggccttgctctccttctcctgctcttggcgctactgttctggctgtatatcgttatgagtgactggactggaggagcgctccttgtcctctataccacgacgccagcgccgcgaccaccaacaccggcgcccaccatcgcgtcgcagcccctgtccctgcgcccagaggcgtgccggccagcggcggggggcgcagtgcacacgagggggctggacttcgcctgtgatatctacatctgggcgcccttggccgggacttgtggggtccttctcctgtcactggttatcaccctttactgcggtggtggcggttctggtggtggcggtagtggcggcggaggaagcggtggtggcggttccggatctatgcgtaaaggcgaagagctgttcactggtgtcgtccctattctggtggaactggatggtgatgtcaacggtcataagttttccgtgcgtggcgagggtgaaggtgacgcaactaatggtaaactgacgctgaagttcatctgtactactggtaaactgccggtaccttggccgactctggtaacgacgctgacttatggtgttcagtgctttgctcgttatccggaccatatgaagcagcatgacttcttcaagtccgccatgccggaaggctatgtgcaggaacgcacgatttcctttaaggatgacggcacgtacaaaacgcgtgcggaagtgaaatttgaaggcgataccctggtaaaccgcattgagctgaaaggcattgactttaaagaagacggcaatatcctgggccataagctggaatacaattttaacagccacaatgtttacatcaccgccgataaacaaaaaaatggcattaaagcgaattttaaaattcgccacaacgtggaggatggcagcgtgcagctggctgatcactaccagcaaaacactccaatcggtgatggtcctgttctgctgccagacaatcactatctgagcacgcaaagcgttctgtctaaagatccgaacgagaaacgcgatcatatggttctgctggagttcgtaaccgcagcgggcatcacgcatggtatggatgaactgtacaaatgataa

SEQ ID NO: 785 - protein, 122 aa, Artificial Sequence
  LMP_L-CD8HTM_aa_No_GFP
MALPVTALLLPLALLLHAARPLGLALLLLLLALLFWLYIVMSDWTGGALLVLYTTTPAPRPPTPAPTIASQPLSLRPEACRPAAGGAVHTRGLDFACDIYIWAPLAGTCGVLLLSLVITLYC

SEQ ID NO: 786 - DNA, 366 bp, Artificial Sequence
  LMP_L-CD8HTM_NT_No_GFP
atggcactccccgtaactgctctgctgctgccgttggcattgctcctgcacgccgcacgcccgcttggccttgctctccttctcctgctcttggcgctactgttctggctgtatatcgttatgagtgactggactggaggagcgctccttgtcctctataccacgacgccagcgccgcgaccaccaacaccggcgcccaccatcgcgtcgcagcccctgtccctgcgcccagaggcgtgccggccagcggcggggggcgcagtgcacacgagggggctggacttcgcctgtgatatctacatctgggcgcccttggccgggacttgtggggtccttctcctgtcactggttatcaccctttactgc

SEQ ID NO: 787 - protein, 385 aa, Artificial Sequence
  LALLFWLx5-CD8HTM_sfGFP_aa
MALPVTALLLPLALLLHAARPLALLFWLLALLFWLLALLFWLLALLFWLLALLFWLTTTPAPRPPTPAPTIASQPLSLRPEACRPAAGGAVHTRGLDFACDIYIWAPLAGTCGVLLLSLVITLYCGGGGSGGGGSGGGGSGGGGSGSMRKGEELFTGVVPILVELDGDVNGHKFSVRGEGEGDATNGKLTLKFICTTGKLPVPWPTLVTTLTYGVQCFARYPDHMKQHDFFKSAMPEGYVQERTISFKDDGTYKTRAEVKFEGDTLVNRIELKGIDFKEDGNILGHKLEYNFNSHNVYITADKQKNGIKANFKIRHNVEDGSVQLADHYQQNTPIGDGPVLLPDNHYLSTQSVLSKDPNEKRDHMVLLEFVTAAGITHGMDELYK

SEQ ID NO: 788 - DNA, 1161 bp, Artificial Sequence
  LALLFWLx5-CD8HTM_sfGFP
atggcactccccgtaactgctctgctgctgccgttggcattgctcctgcacgccgcacgcccgttggcgctactgttctggctgttggcgctactgttctggctgttggcgctactgttctggctgttggcgctactgttctggctgttggcgctactgttctggctgaccacgacgccagcgccgcgaccaccaacaccggcgcccaccatcgcgtcgcagcccctgtccctgcgcccagaggcgtgccggccagcggcggggggcgcagtgcacacgagggggctggacttcgcctgtgatatctacatctgggcgcccttggccgggacttgtggggtccttctcctgtcactggttatcaccctttactgcggtggtggcggttctggtggtggcggtagtggcggcggaggaagcggtggtggcggttccggatctatgcgtaaaggcgaagagctgttcactggtgtcgtccctattctggtggaactggatggtgatgtcaacggtcataagttttccgtgcgtggcgagggtgaaggtgacgcaactaatggtaaactgacgctgaagttcatctgtactactggtaaactgccggtaccttggccgactctggtaacgacgctgacttatggtgttcagtgctttgctcgttatccggaccatatgaagcagcatgacttcttcaagtccgccatgccggaaggctatgtgcaggaacgcacgatttcctttaaggatgacggcacgtacaaaacgcgtgcggaagtgaaatttgaaggcgataccctggtaaaccgcattgagctgaaaggcattgactttaaagaagacggcaatatcctgggccataagctggaatacaattttaacagccacaatgtttacatcaccgccgataaacaaaaaaatggcattaaagcgaattttaaaattcgccacaacgtggaggatggcagcgtgcagctggctgatcactaccagcaaaacactccaatcggtgatggtcctgttctgctgccagacaatcactatctgagcacgcaaagcgttctgtctaaagatccgaacgagaaacgcgatcatatggttctgctggagttcgtaaccgcagcgggcatcacgcatggtatggatgaactgtacaaatgataa

SEQ ID NO: 789 - protein, 125 aa, Artificial Sequence
  LALLFWLx5-CD8HTM_aa_no_GFP
MALPVTALLLPLALLLHAARPLALLFWLLALLFWLLALLFWLLALLFWLLALLFWLTTTPAPRPPTPAPTIASQPLSLRPEACRPAAGGAVHTRGLDFACDIYIWAPLAGTCGVLLLSLVITLYC

SEQ ID NO: 790 - DNA, 375 bp, Artificial Sequence
  LALLFWLx5-CD8HTM_NT_No_GFP
atggcactccccgtaactgctctgctgctgccgttggcattgctcctgcacgccgcacgcccgttggcgctactgttctggctgttggcgctactgttctggctgttggcgctactgttctggctgttggcgctactgttctggctgttggcgctactgttctggctgaccacgacgccagcgccgcgaccaccaacaccggcgcccaccatcgcgtcgcagcccctgtccctgcgcccagaggcgtgccggccagcggcggggggcgcagtgcacacgagggggctggacttcgcctgtgatatctacatctgggcgcccttggccgggacttgtggggtccttctcctgtcactggttatcaccctttactgc

SEQ ID NO: 791 - protein, 373 aa, Artificial Sequence
  GP41fptm_sfGFP_aa
MALPVTALLLPLALLLHAARPAVGIGALFLGFLGAAGSTMGAASMTLTVQARQLLSGIVQQQNNLLRAIEAQQHLLQLTVWGIKQLQARILLFIMIVGGLVGLRIVFAVLSIVGGGGSGGGGSGGGGSGGGGSGSMRKGEELFTGVVPILVELDGDVNGHKFSVRGEGEGDATNGKLTLKFICTTGKLPVPWPTLVTTLTYGVQCFARYPDHMKQHDFFKSAMPEGYVQERTISFKDDGTYKTRAEVKFEGDTLVNRIELKGIDFKEDGNILGHKLEYNFNSHNVYITADKQKNGIKANFKIRHNVEDGSVQLADHYQQNTPIGDGPVLLPDNHYLSTQSVLSKDPNEKRDHMVLLEFVTAAGITHGMDELYK

SEQ ID NO: 792 - DNA, 1125 bp, Artificial Sequence
  GP41fptm_sfGFP
atggcactccccgtaactgctctgctgctgccgttggcattgctcctgcacgccgcacgcccggcagtgggaataggagctttgttccttgggttcttgggagcagcaggaagcactatgggcgcagcctcaatgacgctgacggtacaggccagacaattattgtctggtatagtgcagcagcagaacaatttgctgagggctattgaggcgcaacagcatctgttgcaactcacagtctggggcatcaagcagctccaggcaagaatcctgttattcataatgatagtaggaggcttggtaggtttaagaatagtttttgctgtactttctatagtgggtggtggcggttctggtggtggcggtagtggcggcggaggaagcggtggtggcggttccggatctatgcgtaaaggcgaagagctgttcactggtgtcgtccctattctggtggaactggatggtgatgtcaacggtcataagttttccgtgcgtggcgagggtgaaggtgacgcaactaatggtaaactgacgctgaagttcatctgtactactggtaaactgccggtaccttggccgactctggtaacgacgctgacttatggtgttcagtgctttgctcgttatccggaccatatgaagcagcatgacttcttcaagtccgccatgccggaaggctatgtgcaggaacgcacgatttcctttaaggatgacggcacgtacaaaacgcgtgcggaagtgaaatttgaaggcgataccctggtaaaccgcattgagctgaaaggcattgactttaaagaagacggcaatatcctgggccataagctggaatacaattttaacagccacaatgtttacatcaccgccgataaacaaaaaaatggcattaaagcgaattttaaaattcgccacaacgtggaggatggcagcgtgcagctggctgatcactaccagcaaaacactccaatcggtgatggtcctgttctgctgccagacaatcactatctgagcacgcaaagcgttctgtctaaagatccgaacgagaaacgcgatcatatggttctgctggagttcgtaaccgcagcgggcatcacgcatggtatggatgaactgtacaaatgataa

SEQ ID NO: 793 - protein, 113 aa, Artificial Sequence
  GP41fptm_aa_No-GFP
MALPVTALLLPLALLLHAARPAVGIGALFLGFLGAAGSTMGAASMTLTVQARQLLSGIVQQQNNLLRAIEAQQHLLQLTVWGIKQLQARILLFIMIVGGLVGLRIVFAVLSIV

SEQ ID NO: 794 - DNA, 339 bp, Artificial Sequence
  GP41fptm_NT_No_GFP
atggcactccccgtaactgctctgctgctgccgttggcattgctcctgcacgccgcacgcccggcagtgggaataggagctttgttccttgggttcttgggagcagcaggaagcactatgggcgcagcctcaatgacgctgacggtacaggccagacaattattgtctggtatagtgcagcagcagaacaatttgctgagggctattgaggcgcaacagcatctgttgcaactcacagtctggggcatcaagcagctccaggcaagaatcctgttattcataatgatagtaggaggcttggtaggtttaagaatagtttttgctgtactttctatagtg

SEQ ID NO: 795 - protein, 323 aa, Artificial Sequence
  CKS17-8aTM_sfGFP_aa
MALPVTALLLPLALLLHAARPLQNRRGLDLLFLKEGGLCIYIWAPLAGTCGVLLLSLVITLYCGGGGSGGGGSGGGGSGGGGSGSMRKGEELFTGVVPILVELDGDVNGHKFSVRGEGEGDATNGKLTLKFICTTGKLPVPWPTLVTTLTYGVQCFARYPDHMKQHDFFKSAMPEGYVQERTISFKDDGTYKTRAEVKFEGDTLVNRIELKGIDFKEDGNILGHKLEYNFNSHNVYITADKQKNGIKANFKIRHNVEDGSVQLADHYQQNTPIGDGPVLLPDNHYLSTQSVLSKDPNEKRDHMVLLEFVTAAGITHGMDELYK

SEQ ID NO: 796 - DNA, 975 bp, Artificial Sequence
  CKS17-8aTM_sfGFP
atggcactccccgtaactgctctgctgctgccgttggcattgctcctgcacgccgcacgcccgctgcaaaacagaaggggattagacctgctttttcttaaagagggagggctctgcatctacatctgggcgcccttggccgggacttgtggggtccttctcctgtcactggttatcaccctttactgcggtggtggcggttctggtggtggcggtagtggcggcggaggaagcggtggtggcggttccggatctatgcgtaaaggcgaagagctgttcactggtgtcgtccctattctggtggaactggatggtgatgtcaacggtcataagttttccgtgcgtggcgagggtgaaggtgacgcaactaatggtaaactgacgctgaagttcatctgtactactggtaaactgccggtaccttggccgactctggtaacgacgctgacttatggtgttcagtgctttgctcgttatccggaccatatgaagcagcatgacttcttcaagtccgccatgccggaaggctatgtgcaggaacgcacgatttcctttaaggatgacggcacgtacaaaacgcgtgcggaagtgaaatttgaaggcgataccctggtaaaccgcattgagctgaaaggcattgactttaaagaagacggcaatatcctgggccataagctggaatacaattttaacagccacaatgtttacatcaccgccgataaacaaaaaaatggcattaaagcgaattttaaaattcgccacaacgtggaggatggcagcgtgcagctggctgatcactaccagcaaaacactccaatcggtgatggtcctgttctgctgccagacaatcactatctgagcacgcaaagcgttctgtctaaagatccgaacgagaaacgcgatcatatggttctgctggagttcgtaaccgcagcgggcatcacgcatggtatggatgaactgtacaaatgataa

SEQ ID NO: 797 - protein, 63 aa, Artificial Sequence
  CKS17-8aTM_aa_No_GFP
MALPVTALLLPLALLLHAARPLQNRRGLDLLFLKEGGLCIYIWAPLAGTCGVLLLSLVITLYC

SEQ ID NO: 798 - DNA, 189 bp, Artificial Sequence
  CKS17-8aTM_NT_No_GFP
atggcactccccgtaactgctctgctgctgccgttggcattgctcctgcacgccgcacgcccgctgcaaaacagaaggggattagacctgctttttcttaaagagggagggctctgcatctacatctgggcgcccttggccgggacttgtggggtccttctcctgtcactggttatcaccctttactgc

SEQ ID NO: 799 - protein, 350 aa, Artificial Sequence
  CKS_HTLV-8aTM_sfGFP_aa
MALPVTALLLPLALLLHAARPLQNRRGLDLLFLKEGGLAQNRRGLDLLFWEQGGLCKALQEQCRFPIYIWAPLAGTCGVLLLSLVITLYCGGGGSGGGGSGGGGSGGGGSGSMRKGEELFTGVVPILVELDGDVNGHKFSVRGEGEGDATNGKLTLKFICTTGKLPVPWPTLVTTLTYGVQCFARYPDHMKQHDFFKSAMPEGYVQERTISFKDDGTYKTRAEVKFEGDTLVNRIELKGIDFKEDGNILGHKLEYNFNSHNVYITADKQKNGIKANFKIRHNVEDGSVQLADHYQQNTPIGDGPVLLPDNHYLSTQSVLSKDPNEKRDHMVLLEFVTAAGITHGMDELYK

SEQ ID NO: 800 - DNA, 1056 bp, Artificial Sequence
  CKS_HTLV-8aTM_NT_No_GFP
atggcactccccgtaactgctctgctgctgccgttggcattgctcctgcacgccgcacgcccgctgcaaaacagaaggggattagacctgctttttcttaaagagggagggctcgcccagaacagacgaggccttgatctcctattctgggagcaaggaggattatgcaaagcattacaagaacagtgccgttttccgatctacatctgggcgcccttggccgggacttgtggggtccttctcctgtcactggttatcaccctttactgcggtggtggcggttctggtggtggcggtagtggcggcggaggaagcggtggtggcggttccggatctatgcgtaaaggcgaagagctgttcactggtgtcgtccctattctggtggaactggatggtgatgtcaacggtcataagttttccgtgcgtggcgagggtgaaggtgacgcaactaatggtaaactgacgctgaagttcatctgtactactggtaaactgccggtaccttggccgactctggtaacgacgctgacttatggtgttcagtgctttgctcgttatccggaccatatgaagcagcatgacttcttcaagtccgccatgccggaaggctatgtgcaggaacgcacgatttcctttaaggatgacggcacgtacaaaacgcgtgcggaagtgaaatttgaaggcgataccctggtaaaccgcattgagctgaaaggcattgactttaaagaagacggcaatatcctgggccataagctggaatacaattttaacagccacaatgtttacatcaccgccgataaacaaaaaaatggcattaaagcgaattttaaaattcgccacaacgtggaggatggcagcgtgcagctggctgatcactaccagcaaaacactccaatcggtgatggtcctgttctgctgccagacaatcactatctgagcacgcaaagcgttctgtctaaagatccgaacgagaaacgcgatcatatggttctgctggagttcgtaaccgcagcgggcatcacgcatggtatggatgaactgtacaaatgataa

SEQ ID NO: 801 - protein, 90 aa, Artificial Sequence
  CKS_HTLV-8aTM_aa_No_GFP
MALPVTALLLPLALLLHAARPLQNRRGLDLLFLKEGGLAQNRRGLDLLFWEQGGLCKALQEQCRFPIYIWAPLAGTCGVLLLSLVITLYC

SEQ ID NO: 802 - DNA, 270 bp, Artificial Sequence
  CKS_HTLV-8aTM_sfGFP
atggcactccccgtaactgctctgctgctgccgttggcattgctcctgcacgccgcacgcccgctgcaaaacagaaggggattagacctgctttttcttaaagagggagggctcgcccagaacagacgaggccttgatctcctattctgggagcaaggaggattatgcaaagcattacaagaacagtgccgttttccgatctacatctgggcgcccttggccgggacttgtggggtccttctcctgtcactggttatcaccctttactgc

SEQ ID NO: 803 - protein, 354 aa, Artificial Sequence
  CKS_LMP-8aTM_sfGFP_aa
MALPVTALLLPLALLLHAARPLQNRRGLDLLFLKEGGLLGLALLLLLLALLFWLYIVMSDWTGGALLVLYIYIWAPLAGTCGVLLLSLVITLYCGGGGSGGGGSGGGGSGGGGSGSMRKGEELFTGVVPILVELDGDVNGHKFSVRGEGEGDATNGKLTLKFICTTGKLPVPWPTLVTTLTYGVQCFARYPDHMKQHDFFKSAMPEGYVQERTISFKDDGTYKTRAEVKFEGDTLVNRIELKGIDFKEDGNILGHKLEYNFNSHNVYITADKQKNGIKANFKIRHNVEDGSVQLADHYQQNTPIGDGPVLLPDNHYLSTQSVLSKDPNEKRDHMVLLEFVTAAGITHGMDELYK

SEQ ID NO: 804 - DNA, 1068 bp, Artificial Sequence
  CKS_LMP-8aTM_sfGFP
atggcactccccgtaactgctctgctgctgccgttggcattgctcctgcacgccgcacgcccgctgcaaaacagaaggggattagacctgctttttcttaaagagggagggctccttggccttgctctccttctcctgctcttggcgctactgttctggctgtatatcgttatgagtgactggactggaggagcgctccttgtcctctatatctacatctgggcgcccttggccgggacttgtggggtccttctcctgtcactggttatcaccctttactgcggtggtggcggttctggtggtggcggtagtggcggcggaggaagcggtggtggcggttccggatctatgcgtaaaggcgaagagctgttcactggtgtcgtccctattctggtggaactggatggtgatgtcaacggtcataagttttccgtgcgtggcgagggtgaaggtgacgcaactaatggtaaactgacgctgaagttcatctgtactactggtaaactgccggtaccttggccgactctggtaacgacgctgacttatggtgttcagtgctttgctcgttatccggaccatatgaagcagcatgacttcttcaagtccgccatgccggaaggctatgtgcaggaacgcacgatttcctttaaggatgacggcacgtacaaaacgcgtgcggaagtgaaatttgaaggcgataccctggtaaaccgcattgagctgaaaggcattgactttaaagaagacggcaatatcctgggccataagctggaatacaattttaacagccacaatgtttacatcaccgccgataaacaaaaaaatggcattaaagcgaattttaaaattcgccacaacgtggaggatggcagcgtgcagctggctgatcactaccagcaaaacactccaatcggtgatggtcctgttctgctgccagacaatcactatctgagcacgcaaagcgttctgtctaaagatccgaacgagaaacgcgatcatatggttctgctggagttcgtaaccgcagcgggcatcacgcatggtatggatgaactgtacaaatgataa

SEQ ID NO: 805 - protein, 94 aa, Artificial Sequence
  CKS_LMP-8aTM_aa_no_GFP
MALPVTALLLPLALLLHAARPLQNRRGLDLLFLKEGGLLGLALLLLLLALLFWLYIVMSDWTGGALLVLYIYIWAPLAGTCGVLLLSLVITLYC

SEQ ID NO: 806 - DNA, 282 bp, Artificial Sequence
  CKS_LMP-8aTM_NT_No_GFP
atggcactccccgtaactgctctgctgctgccgttggcattgctcctgcacgccgcacgcccgctgcaaaacagaaggggattagacctgctttttcttaaagagggagggctccttggccttgctctccttctcctgctcttggcgctactgttctggctgtatatcgttatgagtgactggactggaggagcgctccttgtcctctatatctacatctgggcgcccttggccgggacttgtggggtccttctcctgtcactggttatcaccctttactgc

SEQ ID NO: 807 - protein, 390 aa, Artificial Sequence
  CKS_GP41fptm_sfGFP_aa
MALPVTALLLPLALLLHAARPAVGIGALFLGFLGAAGLQNRRGLDLLFLKEGGLSTMGAASMTLTVQARQLLSGIVQQQNNLLRAIEAQQHLLQLTVWGIKQLQARILLFIMIVGGLVGLRIVFAVLSIVGGGGSGGGGSGGGGSGGGGSGSMRKGEELFTGVVPILVELDGDVNGHKFSVRGEGEGDATNGKLTLKFICTTGKLPVPWPTLVTTLTYGVQCFARYPDHMKQHDFFKSAMPEGYVQERTISFKDDGTYKTRAEVKFEGDTLVNRIELKGIDFKEDGNILGHKLEYNFNSHNVYITADKQKNGIKANFKIRHNVEDGSVQLADHYQQNTPIGDGPVLLPDNHYLSTQSVLSKDPNEKRDHMVLLEFVTAAGITHGMDELYK

SEQ ID NO: 808 - DNA, 1176 bp, Artificial Sequence
  CKS_GP41fptm_sfGFP
atggcactccccgtaactgctctgctgctgccgttggcattgctcctgcacgccgcacgcccggcagtgggaataggagctttgttccttgggttcttgggagcagcaggactgcaaaacagaaggggattagacctgctttttcttaaagagggagggctcagcactatgggcgcagcctcaatgacgctgacggtacaggccagacaattattgtctggtatagtgcagcagcagaacaatttgctgagggctattgaggcgcaacagcatctgttgcaactcacagtctggggcatcaagcagctccaggcaagaatcctgttattcataatgatagtaggaggcttggtaggtttaagaatagtttttgctgtactttctatagtgggtggtggcggttctggtggtggcggtagtggcggcggaggaagcggtggtggcggttccggatctatgcgtaaaggcgaagagctgttcactggtgtcgtccctattctggtggaactggatggtgatgtcaacggtcataagttttccgtgcgtggcgagggtgaaggtgacgcaactaatggtaaactgacgctgaagttcatctgtactactggtaaactgccggtaccttggccgactctggtaacgacgctgacttatggtgttcagtgctttgctcgttatccggaccatatgaagcagcatgacttcttcaagtccgccatgccggaaggctatgtgcaggaacgcacgatttcctttaaggatgacggcacgtacaaaacgcgtgcggaagtgaaatttgaaggcgataccctggtaaaccgcattgagctgaaaggcattgactttaaagaagacggcaatatcctgggccataagctggaatacaattttaacagccacaatgtttacatcaccgccgataaacaaaaaaatggcattaaagcgaattttaaaattcgccacaacgtggaggatggcagcgtgcagctggctgatcactaccagcaaaacactccaatcggtgatggtcctgttctgctgccagacaatcactatctgagcacgcaaagcgttctgtctaaagatccgaacgagaaacgcgatcatatggttctgctggagttcgtaaccgcagcgggcatcacgcatggtatggatgaactgtacaaatgataa

SEQ ID NO: 809 - protein, 130 aa, Artificial Sequence
  CKS_GP41fptm_aa_No_GFP
MALPVTALLLPLALLLHAARPAVGIGALFLGFLGAAGLQNRRGLDLLFLKEGGLSTMGAASMTLTVQARQLLSGIVQQQNNLLRAIEAQQHLLQLTVWGIKQLQARILLFIMIVGGLVGLRIVFAVLSIV

SEQ ID NO: 810 - DNA, 390 bp, Artificial Sequence
  CKS_GP41fptm_NT_No_GFP
atggcactccccgtaactgctctgctgctgccgttggcattgctcctgcacgccgcacgcccggcagtgggaataggagctttgttccttgggttcttgggagcagcaggactgcaaaacagaaggggattagacctgctttttcttaaagagggagggctcagcactatgggcgcagcctcaatgacgctgacggtacaggccagacaattattgtctggtatagtgcagcagcagaacaatttgctgagggctattgaggcgcaacagcatctgttgcaactcacagtctggggcatcaagcagctccaggcaagaatcctgttattcataatgatagtaggaggcttggtaggtttaagaatagtttttgctgtactttctatagtg

SEQ ID NO: 811 - protein, 366 aa, Artificial Sequence
  LMP_S-CD8HTM_sfGFP_aa
MALPVTALLLPLALLLHAARPLGLALLLLLLALLFWLTTTPAPRPPTPAPTIASQPLSLRPEACRPAAGGAVHTRGLDFACDIYIWAPLAGTCGVLLLSLVITLYCGGGGSGGGGSGGGGSGGGGSGSMRKGEELFTGVVPILVELDGDVNGHKFSVRGEGEGDATNGKLTLKFICTTGKLPVPWPTLVTTLTYGVQCFARYPDHMKQHDFFKSAMPEGYVQERTISFKDDGTYKTRAEVKFEGDTLVNRIELKGIDFKEDGNILGHKLEYNFNSHNVYITADKQKNGIKANFKIRHNVEDGSVQLADHYQQNTPIGDGPVLLPDNHYLSTQSVLSKDPNEKRDHMVLLEFVTAAGITHGMDELYK

SEQ ID NO: 812 - DNA, 1104 bp, Artificial Sequence
  LMP_S-CD8HTM_sfGFP
atggcactccccgtaactgctctgctgctgccgttggcattgctcctgcacgccgcacgcccgcttggccttgctctccttctcctgctcttggcgctactgttctggctgaccacgacgccagcgccgcgaccaccaacaccggcgcccaccatcgcgtcgcagcccctgtccctgcgcccagaggcgtgccggccagcggcggggggcgcagtgcacacgagggggctggacttcgcctgtgatatctacatctgggcgcccttggccgggacttgtggggtccttctcctgtcactggttatcaccctttactgcggtggtggcggttctggtggtggcggtagtggcggcggaggaagcggtggtggcggttccggatctatgcgtaaaggcgaagagctgttcactggtgtcgtccctattctggtggaactggatggtgatgtcaacggtcataagttttccgtgcgtggcgagggtgaaggtgacgcaactaatggtaaactgacgctgaagttcatctgtactactggtaaactgccggtaccttggccgactctggtaacgacgctgacttatggtgttcagtgctttgctcgttatccggaccatatgaagcagcatgacttcttcaagtccgccatgccggaaggctatgtgcaggaacgcacgatttcctttaaggatgacggcacgtacaaaacgcgtgcggaagtgaaatttgaaggcgataccctggtaaaccgcattgagctgaaaggcattgactttaaagaagacggcaatatcctgggccataagctggaatacaattttaacagccacaatgtttacatcaccgccgataaacaaaaaaatggcattaaagcgaattttaaaattcgccacaacgtggaggatggcagcgtgcagctggctgatcactaccagcaaaacactccaatcggtgatggtcctgttctgctgccagacaatcactatctgagcacgcaaagcgttctgtctaaagatccgaacgagaaacgcgatcatatggttctgctggagttcgtaaccgcagcgggcatcacgcatggtatggatgaactgtacaaatgataa

SEQ ID NO: 813 - protein, 106 aa, Artificial Sequence
  LMP_S-CD8HTM_aa_No_GFP
MALPVTALLLPLALLLHAARPLGLALLLLLLALLFWLTTTPAPRPPTPAPTIASQPLSLRPEACRPAAGGAVHTRGLDFACDIYIWAPLAGTCGVLLLSLVITLYC

SEQ ID NO: 814 - DNA, 318 bp, Artificial Sequence
  LMP_S-CD8HTM_NT_No_GFP
atggcactccccgtaactgctctgctgctgccgttggcattgctcctgcacgccgcacgcccgcttggccttgctctccttctcctgctcttggcgctactgttctggctgaccacgacgccagcgccgcgaccaccaacaccggcgcccaccatcgcgtcgcagcccctgtccctgcgcccagaggcgtgccggccagcggcggggggcgcagtgcacacgagggggctggacttcgcctgtgatatctacatctgggcgcccttggccgggacttgtggggtccttctcctgtcactggttatcaccctttactgc

SEQ ID NO: 815 - protein, 475 aa, Artificial Sequence
  LMP_CD47tm162_sfGFP_aa
MALPVTALLLPLALLLHAARPLGLALLLLLLALLFWLYIVMSDWTGGALLVLYMWPLVAALLLGSACCGSAQLLFNKTKSVEFTFCNDTVVIPCFVTNMEAQNTTEVYVKWKFKGRDIYTFDGALNKSTVPTDFSSAKIEVSQLLKGDASLKMDKSDAVSHTGNYTCEVTELTREGETIIELKYRVVSWFSPNENILIVIFPIFAILLFWGQFGIGGGGSGGGGSGGGGSGGGGSGSMRKGEELFTGVVPILVELDGDVNGHKFSVRGEGEGDATNGKLTLKFICTTGKLPVPWPTLVTTLTYGVQCFARYPDHMKQHDFFKSAMPEGYVQERTISFKDDGTYKTRAEVKFEGDTLVNRIELKGIDFKEDGNILGHKLEYNFNSHNVYITADKQKNGIKANFKIRHNVEDGSVQLADHYQQNTPIGDGPVLLPDNHYLSTQSVLSKDPNEKRDHMVLLEFVTAAGITHGMDELYK

SEQ ID NO: 816 - DNA, 1431 bp, Artificial Sequence
  LMP_CD47tm162_sfGFP
atggcactccccgtaactgctctgctgctgccgttggcattgctcctgcacgccgcacgcccgcttggccttgctctccttctcctgctcttggcgctactgttctggctgtatatcgttatgagtgactggactggaggagcgctccttgtcctctatatgtggcccctggtagcggcgctgttgctgggctcggcgtgctgcggatcagctcagctactatttaataaaacaaaatctgtagaattcacgttttgtaatgacactgtcgtcattccatgctttgttactaatatggaggcacaaaacactactgaagtatacgtaaagtggaaatttaaaggaagagatatttacacctttgatggagctctaaacaagtccactgtccccactgactttagtagtgcaaaaattgaagtctcacaattactaaaaggagatgcctctttgaagatggataagagtgatgctgtctcacacacaggaaactacacttgtgaagtaacagaattaaccagagaaggtgaaacgatcatcgagctaaaatatcgtgttgtttcatggttttctccaaatgaaaatattcttattgttattttcccaatttttgctatactcctgttctggggacagtttggtattggtggtggcggttctggtggtggcggtagtggcggcggaggaagcggtggtggcggttccggatctatgcgtaaaggcgaagagctgttcactggtgtcgtccctattctggtggaactggatggtgatgtcaacggtcataagttttccgtgcgtggcgagggtgaaggtgacgcaactaatggtaaactgacgctgaagttcatctgtactactggtaaactgccggtaccttggccgactctggtaacgacgctgacttatggtgttcagtgctttgctcgttatccggaccatatgaagcagcatgacttcttcaagtccgccatgccggaaggctatgtgcaggaacgcacgatttcctttaaggatgacggcacgtacaaaacgcgtgcggaagtgaaatttgaaggcgataccctggtaaaccgcattgagctgaaaggcattgactttaaagaagacggcaatatcctgggccataagctggaatacaattttaacagccacaatgtttacatcaccgccgataaacaaaaaaatggcattaaagcgaattttaaaattcgccacaacgtggaggatggcagcgtgcagctggctgatcactaccagcaaaacactccaatcggtgatggtcctgttctgctgccagacaatcactatctgagcacgcaaagcgttctgtctaaagatccgaacgagaaacgcgatcatatggttctgctggagttcgtaaccgcagcgggcatcacgcatggtatggatgaactgtacaaatgataa

SEQ ID NO: 817 - protein, 215 aa, Artificial Sequence
  LMP_CD47tm162_aa_No_GFP
MALPVTALLLPLALLLHAARPLGLALLLLLLALLFWLYIVMSDWTGGALLVLYMWPLVAALLLGSACCGSAQLLFNKTKSVEFTFCNDTVVIPCFVTNMEAQNTTEVYVKWKFKGRDIYTFDGALNKSTVPTDFSSAKIEVSQLLKGDASLKMDKSDAVSHTGNYTCEVTELTREGETIIELKYRVVSWFSPNENILIVIFPIFAILLFWGQFGI

SEQ ID NO: 818 - DNA, 645 bp, Artificial Sequence
  LMP_CD47tm162_NT_No_GFP
atggcactccccgtaactgctctgctgctgccgttggcattgctcctgcacgccgcacgcccgcttggccttgctctccttctcctgctcttggcgctactgttctggctgtatatcgttatgagtgactggactggaggagcgctccttgtcctctatatgtggcccctggtagcggcgctgttgctgggctcggcgtgctgcggatcagctcagctactatttaataaaacaaaatctgtagaattcacgttttgtaatgacactgtcgtcattccatgctttgttactaatatggaggcacaaaacactactgaagtatacgtaaagtggaaatttaaaggaagagatatttacacctttgatggagctctaaacaagtccactgtccccactgactttagtagtgcaaaaattgaagtctcacaattactaaaaggagatgcctctttgaagatggataagagtgatgctgtctcacacacaggaaactacacttgtgaagtaacagaattaaccagagaaggtgaaacgatcatcgagctaaaatatcgtgttgtttcatggttttctccaaatgaaaatattcttattgttattttcccaatttttgctatactcctgttctggggacagtttggtatt

SEQ ID NO: 819 - protein, 471 aa, Artificial Sequence
  p15E_CD47tm162_sfGFP_aa
MALPVTALLLPLALLLHAARPLQNRRGLDLLFLKEGGLCAALKEECCFYMWPLVAALLLGSACCGSAQLLFNKTKSVEFTFCNDTVVIPCFVTNMEAQNTTEVYVKWKFKGRDIYTFDGALNKSTVPTDFSSAKIEVSQLLKGDASLKMDKSDAVSHTGNYTCEVTELTREGETIIELKYRVVSWFSPNENILIVIFPIFAILLFWGQFGIGGGGSGGGGSGGGGSGGGGSGSMRKGEELFTGVVPILVELDGDVNGHKFSVRGEGEGDATNGKLTLKFICTTGKLPVPWPTLVTTLTYGVQCFARYPDHMKQHDFFKSAMPEGYVQERTISFKDDGTYKTRAEVKFEGDTLVNRIELKGIDFKEDGNILGHKLEYNFNSHNVYITADKQKNGIKANFKIRHNVEDGSVQLADHYQQNTPIGDGPVLLPDNHYLSTQSVLSKDPNEKRDHMVLLEFVTAAGITHGMDELYK

SEQ ID NO: 820 - DNA, 1419 bp, Artificial Sequence
  p15E_CD47tm162_sfGFP
atggcactccccgtaactgctctgctgctgccgttggcattgctcctgcacgccgcacgcccgctgcaaaacagaaggggattagacctgctttttcttaaagagggagggctctgtgctgccttaaaggaagaatgttgcttttatatgtggcccctggtagcggcgctgttgctgggctcggcgtgctgcggatcagctcagctactatttaataaaacaaaatctgtagaattcacgttttgtaatgacactgtcgtcattccatgctttgttactaatatggaggcacaaaacactactgaagtatacgtaaagtggaaatttaaaggaagagatatttacacctttgatggagctctaaacaagtccactgtccccactgactttagtagtgcaaaaattgaagtctcacaattactaaaaggagatgcctctttgaagatggataagagtgatgctgtctcacacacaggaaactacacttgtgaagtaacagaattaaccagagaaggtgaaacgatcatcgagctaaaatatcgtgttgtttcatggttttctccaaatgaaaatattcttattgttattttcccaatttttgctatactcctgttctggggacagtttggtattggtggtggcggttctggtggtggcggtagtggcggcggaggaagcggtggtggcggttccggatctatgcgtaaaggcgaagagctgttcactggtgtcgtccctattctggtggaactggatggtgatgtcaacggtcataagttttccgtgcgtggcgagggtgaaggtgacgcaactaatggtaaactgacgctgaagttcatctgtactactggtaaactgccggtaccttggccgactctggtaacgacgctgacttatggtgttcagtgctttgctcgttatccggaccatatgaagcagcatgacttcttcaagtccgccatgccggaaggctatgtgcaggaacgcacgatttcctttaaggatgacggcacgtacaaaacgcgtgcggaagtgaaatttgaaggcgataccctggtaaaccgcattgagctgaaaggcattgactttaaagaagacggcaatatcctgggccataagctggaatacaattttaacagccacaatgtttacatcaccgccgataaacaaaaaaatggcattaaagcgaattttaaaattcgccacaacgtggaggatggcagcgtgcagctggctgatcactaccagcaaaacactccaatcggtgatggtcctgttctgctgccagacaatcactatctgagcacgcaaagcgttctgtctaaagatccgaacgagaaacgcgatcatatggttctgctggagttcgtaaccgcagcgggcatcacgcatggtatggatgaactgtacaaatgataa

SEQ ID NO: 821 - protein, 211 aa, Artificial Sequence
  p15E_CD47tm162_aa_No_GFP
MALPVTALLLPLALLLHAARPLQNRRGLDLLFLKEGGLCAALKEECCFYMWPLVAALLLGSACCGSAQLLFNKTKSVEFTFCNDTVVIPCFVTNMEAQNTTEVYVKWKFKGRDIYTFDGALNKSTVPTDFSSAKIEVSQLLKGDASLKMDKSDAVSHTGNYTCEVTELTREGETIIELKYRVVSWFSPNENILIVIFPIFAILLFWGQFGI

SEQ ID NO: 822 - DNA, 633 bp, Artificial Sequence
  p15E_CD47tm162_NT_No_GFP
atggcactccccgtaactgctctgctgctgccgttggcattgctcctgcacgccgcacgcccgctgcaaaacagaaggggattagacctgctttttcttaaagagggagggctctgtgctgccttaaaggaagaatgttgcttttatatgtggcccctggtagcggcgctgttgctgggctcggcgtgctgcggatcagctcagctactatttaataaaacaaaatctgtagaattcacgttttgtaatgacactgtcgtcattccatgctttgttactaatatggaggcacaaaacactactgaagtatacgtaaagtggaaatttaaaggaagagatatttacacctttgatggagctctaaacaagtccactgtccccactgactttagtagtgcaaaaattgaagtctcacaattactaaaaggagatgcctctttgaagatggataagagtgatgctgtctcacacacaggaaactacacttgtgaagtaacagaattaaccagagaaggtgaaacgatcatcgagctaaaatatcgtgttgtttcatggttttctccaaatgaaaatattcttattgttattttcccaatttttgctatactcctgttctggggacagtttggtatt

SEQ ID NO: 823 - protein, 513 aa, Artificial Sequence
  CD47_GP41fptm_sfGFP_aa
MALPVTALLLPLALLLHAARPAVGIGALFLGFLGAAGWPLVAALLLGSACCGSAQLLFNKTKSVEFTFCNDTVVIPCFVTNMEAQNTTEVYVKWKFKGRDIYTFDGALNKSTVPTDFSSAKIEVSQLLKGDASLKMDKSDAVSHTGNYTCEVTELTREGETIIELKYRVVSWFSPNESTMGAASMTLTVQARQLLSGIVQQQNNLLRAIEAQQHLLQLTVWGIKQLQARILLFIMIVGGLVGLRIVFAVLSIVGGGGSGGGGSGGGGSGGGGSGSMRKGEELFTGVVPILVELDGDVNGHKFSVRGEGEGDATNGKLTLKFICTTGKLPVPWPTLVTTLTYGVQCFARYPDHMKQHDFFKSAMPEGYVQERTISFKDDGTYKTRAEVKFEGDTLVNRIELKGIDFKEDGNILGHKLEYNFNSHNVYITADKQKNGIKANFKIRHNVEDGSVQLADHYQQNTPIGDGPVLLPDNHYLSTQSVLSKDPNEKRDHMVLLEFVTAAGITHGMDELYK

SEQ ID NO: 824 - DNA, 1545 bp, Artificial Sequence
  CD47_GP41fptm_sfGFP
atggcactccccgtaactgctctgctgctgccgttggcattgctcctgcacgccgcacgcccggcagtgggaataggagctttgttccttgggttcttgggagcagcaggatggcccctggtagcggcgctgttgctgggctcggcgtgctgcggatcagctcagctactatttaataaaacaaaatctgtagaattcacgttttgtaatgacactgtcgtcattccatgctttgttactaatatggaggcacaaaacactactgaagtatacgtaaagtggaaatttaaaggaagagatatttacacctttgatggagctctaaacaagtccactgtccccactgactttagtagtgcaaaaattgaagtctcacaattactaaaaggagatgcctctttgaagatggataagagtgatgctgtctcacacacaggaaactacacttgtgaagtaacagaattaaccagagaaggtgaaacgatcatcgagctaaaatatcgtgttgtttcatggttttctccaaatgaaagcactatgggcgcagcctcaatgacgctgacggtacaggccagacaattattgtctggtatagtgcagcagcagaacaatttgctgagggctattgaggcgcaacagcatctgttgcaactcacagtctggggcatcaagcagctccaggcaagaatcctgttattcataatgatagtaggaggcttggtaggtttaagaatagtttttgctgtactttctatagtgggtggtggcggttctggtggtggcggtagtggcggcggaggaagcggtggtggcggttccggatctatgcgtaaaggcgaagagctgttcactggtgtcgtccctattctggtggaactggatggtgatgtcaacggtcataagttttccgtgcgtggcgagggtgaaggtgacgcaactaatggtaaactgacgctgaagttcatctgtactactggtaaactgccggtaccttggccgactctggtaacgacgctgacttatggtgttcagtgctttgctcgttatccggaccatatgaagcagcatgacttcttcaagtccgccatgccggaaggctatgtgcaggaacgcacgatttcctttaaggatgacggcacgtacaaaacgcgtgcggaagtgaaatttgaaggcgataccctggtaaaccgcattgagctgaaaggcattgactttaaagaagacggcaatatcctgggccataagctggaatacaattttaacagccacaatgtttacatcaccgccgataaacaaaaaaatggcattaaagcgaattttaaaattcgccacaacgtggaggatggcagcgtgcagctggctgatcactaccagcaaaacactccaatcggtgatggtcctgttctgctgccagacaatcactatctgagcacgcaaagcgttctgtctaaagatccgaacgagaaacgcgatcatatggttctgctggagttcgtaaccgcagcgggcatcacgcatggtatggatgaactgtacaaatgataa

SEQ ID NO: 825 - protein, 253 aa, Artificial Sequence
  CD47_GP41fptm_aa_No_GFP
MALPVTALLLPLALLLHAARPAVGIGALFLGFLGAAGWPLVAALLLGSACCGSAQLLFNKTKSVEFTFCNDTVVIPCFVTNMEAQNTTEVYVKWKFKGRDIYTFDGALNKSTVPTDFSSAKIEVSQLLKGDASLKMDKSDAVSHTGNYTCEVTELTREGETIIELKYRVVSWFSPNESTMGAASMTLTVQARQLLSGIVQQQNNLLRAIEAQQHLLQLTVWGIKQLQARILLFIMIVGGLVGLRIVFAVLSIV

SEQ ID NO: 826 - DNA, 759 bp, Artificial Sequence
  CD47_GP41fptm_NT_No_GFP
atggcactccccgtaactgctctgctgctgccgttggcattgctcctgcacgccgcacgcccggcagtgggaataggagctttgttccttgggttcttgggagcagcaggatggcccctggtagcggcgctgttgctgggctcggcgtgctgcggatcagctcagctactatttaataaaacaaaatctgtagaattcacgttttgtaatgacactgtcgtcattccatgctttgttactaatatggaggcacaaaacactactgaagtatacgtaaagtggaaatttaaaggaagagatatttacacctttgatggagctctaaacaagtccactgtccccactgactttagtagtgcaaaaattgaagtctcacaattactaaaaggagatgcctctttgaagatggataagagtgatgctgtctcacacacaggaaactacacttgtgaagtaacagaattaaccagagaaggtgaaacgatcatcgagctaaaatatcgtgttgtttcatggttttctccaaatgaaagcactatgggcgcagcctcaatgacgctgacggtacaggccagacaattattgtctggtatagtgcagcagcagaacaatttgctgagggctattgaggcgcaacagcatctgttgcaactcacagtctggggcatcaagcagctccaggcaagaatcctgttattcataatgatagtaggaggcttggtaggtttaagaatagtttttgctgtactttctatagtg

SEQ ID NO: 827 - protein, 765 aa, Artificial Sequence
  HLA-E_STE20_sfGFP_aa
MSRSVALAVLALLSLSGLEAVMAPRTLFLGCGGSGGGGSGGGGSGGGGSIQRTPKIQVYSRHPAENGKSNFLNCYVSGFHPSDIEVDLLKNGERIEKVEHSDLSFSKDWSFYLLYYTEFTPTEKDEYACRVNHVTLSQPKIVKWDRDMGGGGSGGGGSGGGGSGGGGSGSHSLKYFHTSVSRPGRGEPRFISVGYVDDTQFVRFDNDAASPRMVPRAPWMEQEGSEYWDRETRSARDTAQIFRVNLRTLRGCYNQSEAGSHTLQWMHGCELGPDGRFLRGYEQFAYDGKDYLTLNEDLRSWTAVDTAAQISEQKSNDASEAEHQRAYLEDTCVEWLHKYLEKGKETLLHLEPPKTHVTHHPISDHEATLRCWALGFYPAEITLTWQQDGEGHTQDTELVETRPAGDGTFQKWAAVVVPSGEEQRYTCHVQHEGLPEPVTLRWKPASQPTIPIVGIIAGLVLLGSVVSGAVVAAVIWRKKSSGGKGGSYSKAEWSDSAQGSESHSLGGGGSGGGGSGGGGSGGGGSGSMRKGEELFTGVVPILVELDGDVNGHKFSVRGEGEGDATNGKLTLKFICTTGKLPVPWPTLVTTLTYGVQCFARYPDHMKQHDFFKSAMPEGYVQERTISFKDDGTYKTRAEVKFEGDTLVNRIELKGIDFKEDGNILGHKLEYNFNSHNVYITADKQKNGIKANFKIRHNVEDGSVQLADHYQQNTPIGDGPVLLPDNHYLSTQSVLSKDPNEKRDHMVLLEFVTAAGITHGMDELYK

SEQ ID NO: 828 - DNA, 2301 bp, Artificial Sequence
  HLA-E_STE20_sfGFP
atgtctcgctccgtggccttagctgtgctcgcgctactctctctttctggcctggaggctgtcatggcgccccgaaccctcttcctgggttgcggcggttctggtggtggcggtagtggcggcggaggaagcggtggtggcggttccatccagcgtactccaaagattcaggtttactcacgtcatccagcagagaatggaaagtcaaatttcctgaattgctatgtgtctgggtttcatccatccgacattgaagttgacttactgaagaatggagagagaattgaaaaagtggagcattcagacttgtctttcagcaaggactggtctttctatctcttgtactacactgaatttacccccactgaaaaagatgagtatgcctgccgtgtgaaccatgtgactttgtcacagcccaagatagttaagtgggatcgagacatgggtggtggcggttctggtggtggcggtagtggcggcggaggaagcggtggtggcggttccggctcccactccttgaagtatttccacacttccgtgtcccggcccggccgcggggagccccgcttcatctctgtgggctacgtggacgacacccagttcgtgcgcttcgacaacgacgccgcgagtccgaggatggtgccgcgggcgccgtggatggagcaggaggggtcagagtattgggaccgggagacacggagcgccagggacaccgcacagattttccgagtgaatctgcggacgctgcgcggctgctacaatcagagcgaggccgggtctcacaccctgcagtggatgcatggctgcgagctggggcccgacgggcgcttcctccgcgggtatgaacagttcgcctacgacggcaaggattatctcaccctgaatgaggacctgcgctcctggaccgcggtggacacggcggctcagatctccgagcaaaagtcaaatgatgcctctgaggcggagcaccagagagcctacctggaagacacatgcgtggagtggctccacaaatacctggagaaggggaaggagacgctgcttcacctggagcccccaaagacacacgtgactcaccaccccatctctgaccatgaggccaccctgaggtgctgggccctgggcttctaccctgcggagatcacactgacctggcagcaggatggggagggccatacccaggacacggagctcgtggagaccaggcctgcaggggatggaaccttccagaagtgggcagctgtggtggtgccttctggagaggagcagagatacacgtgccatgtgcagcatgaggggctacccgagcccgtcaccctgagatggaagccggcttcccagcccaccatccccatcgtgggcatcattgctggcctggttctccttggatctgtggtctctggagctgtggttgctgctgtgatatggaggaagaagagctcaggtggaaaaggagggagctactctaaggctgagtggagcgacagtgcccaggggtctgagtctcacagcttgggtggtggcggttctggtggtggcggtagtggcggcggaggaagcggtggtggcggttccggatctatgcgtaaaggcgaagagctgttcactggtgtcgtccctattctggtggaactggatggtgatgtcaacggtcataagttttccgtgcgtggcgagggtgaaggtgacgcaactaatggtaaactgacgctgaagttcatctgtactactggtaaactgccggtaccttggccgactctggtaacgacgctgacttatggtgttcagtgctttgctcgttatccggaccatatgaagcagcatgacttcttcaagtccgccatgccggaaggctatgtgcaggaacgcacgatttcctttaaggatgacggcacgtacaaaacgcgtgcggaagtgaaatttgaaggcgataccctggtaaaccgcattgagctgaaaggcattgactttaaagaagacggcaatatcctgggccataagctggaatacaattttaacagccacaatgtttacatcaccgccgataaacaaaaaaatggcattaaagcgaattttaaaattcgccacaacgtggaggatggcagcgtgcagctggctgatcactaccagcaaaacactccaatcggtgatggtcctgttctgctgccagacaatcactatctgagcacgcaaagcgttctgtctaaagatccgaacgagaaacgcgatcatatggttctgctggagttcgtaaccgcagcgggcatcacgcatggtatggatgaactgtacaaatgataa

SEQ ID NO: 829 - protein, 505 aa, Artificial Sequence
  HLA-E_STE20_aa_NO_GFP
MSRSVALAVLALLSLSGLEAVMAPRTLFLGCGGSGGGGSGGGGSGGGGSIQRTPKIQVYSRHPAENGKSNFLNCYVSGFHPSDIEVDLLKNGERIEKVEHSDLSFSKDWSFYLLYYTEFTPTEKDEYACRVNHVTLSQPKIVKWDRDMGGGGSGGGGSGGGGSGGGGSGSHSLKYFHTSVSRPGRGEPRFISVGYVDDTQFVRFDNDAASPRMVPRAPWMEQEGSEYWDRETRSARDTAQIFRVNLRTLRGCYNQSEAGSHTLQWMHGCELGPDGRFLRGYEQFAYDGKDYLTLNEDLRSWTAVDTAAQISEQKSNDASEAEHQRAYLEDTCVEWLHKYLEKGKETLLHLEPPKTHVTHHPISDHEATLRCWALGFYPAEITLTWQQDGEGHTQDTELVETRPAGDGTFQKWAAVVVPSGEEQRYTCHVQHEGLPEPVTLRWKPASQPTIPIVGIIAGLVLLGSVVSGAVVAAVIWRKKSSGGKGGSYSKAEWSDSAQGSESHSL

SEQ ID NO: 830 - DNA, 1515 bp, Artificial Sequence
  HLA-E_STE20_NT_NO_GFP
atgtctcgctccgtggccttagctgtgctcgcgctactctctctttctggcctggaggctgtcatggcgccccgaaccctcttcctgggttgcggcggttctggtggtggcggtagtggcggcggaggaagcggtggtggcggttccatccagcgtactccaaagattcaggtttactcacgtcatccagcagagaatggaaagtcaaatttcctgaattgctatgtgtctgggtttcatccatccgacattgaagttgacttactgaagaatggagagagaattgaaaaagtggagcattcagacttgtctttcagcaaggactggtctttctatctcttgtactacactgaatttacccccactgaaaaagatgagtatgcctgccgtgtgaaccatgtgactttgtcacagcccaagatagttaagtgggatcgagacatgggtggtggcggttctggtggtggcggtagtggcggcggaggaagcggtggtggcggttccggctcccactccttgaagtatttccacacttccgtgtcccggcccggccgcggggagccccgcttcatctctgtgggctacgtggacgacacccagttcgtgcgcttcgacaacgacgccgcgagtccgaggatggtgccgcgggcgccgtggatggagcaggaggggtcagagtattgggaccgggagacacggagcgccagggacaccgcacagattttccgagtgaatctgcggacgctgcgcggctgctacaatcagagcgaggccgggtctcacaccctgcagtggatgcatggctgcgagctggggcccgacgggcgcttcctccgcgggtatgaacagttcgcctacgacggcaaggattatctcaccctgaatgaggacctgcgctcctggaccgcggtggacacggcggctcagatctccgagcaaaagtcaaatgatgcctctgaggcggagcaccagagagcctacctggaagacacatgcgtggagtggctccacaaatacctggagaaggggaaggagacgctgcttcacctggagcccccaaagacacacgtgactcaccaccccatctctgaccatgaggccaccctgaggtgctgggccctgggcttctaccctgcggagatcacactgacctggcagcaggatggggagggccatacccaggacacggagctcgtggagaccaggcctgcaggggatggaaccttccagaagtgggcagctgtggtggtgccttctggagaggagcagagatacacgtgccatgtgcagcatgaggggctacccgagcccgtcaccctgagatggaagccggcttcccagcccaccatccccatcgtgggcatcattgctggcctggttctccttggatctgtggtctctggagctgtggttgctgctgtgatatggaggaagaagagctcaggtggaaaaggagggagctactctaaggctgagtggagcgacagtgcccaggggtctgagtctcacagcttg

SEQ ID NO: 831 - protein, 591 aa, Artificial Sequence
  anti-SIRPa aonist_vHL_sfGFP_aa
MALPVTALLLPLALLLHAARPQVQLVESEGGLVQPGGSLRLSCAASGFTFSSYEMNWVRQAPGKGLEWVSYISSSGSTIYYADSVKGRFTISRDNAKNSLYLQMNSLRAEDTAVYYCAREAKGYYYGMDVWGQGTTVTVSSGGGGSGGGGSGGGGSQPVLTQSPSVSVSPGQTASITCSGDKLGDTYACWYQQKPGQSPVLVIYQDTKRPSGIPERFSGSNSGNTATLTISGTQAMDEADYYCQAWDSSTVVFGGGTKLTVLTTTPAPRPPTPAPTIASQPLSLRPEACRPAAGGAVHTRGLDFACDIYIWAPLAGTCGVLLLSLVITLYCGGGGSGGGGSGGGGSGGGGSGSMRKGEELFTGVVPILVELDGDVNGHKFSVRGEGEGDATNGKLTLKFICTTGKLPVPWPTLVTTLTYGVQCFARYPDHMKQHDFFKSAMPEGYVQERTISFKDDGTYKTRAEVKFEGDTLVNRIELKGIDFKEDGNILGHKLEYNFNSHNVYITADKQKNGIKANFKIRHNVEDGSVQLADHYQQNTPIGDGPVLLPDNHYLSTQSVLSKDPNEKRDHMVLLEFVTAAGITHGMDELYK

SEQ ID NO: 832 - DNA, 1779 bp, Artificial Sequence
  anti-SIRPa aonist_vHL_sfGFP
atggcactccccgtaactgctctgctgctgccgttggcattgctcctgcacgccgcacgcccgcaggtgcagctggtggagtctgagggaggcttggtacagcctggagggtccctgagactctcctgtgcagcctctggattcaccttcagtagttatgaaatgaactgggtccgccaggctccagggaaggggctggagtgggtttcatacattagtagtagtggtagtaccatatactacgcagactctgtgaagggccgattcaccatctccagagacaacgccaagaactcactgtatctgcaaatgaacagcctgagagccgaggacacggctgtttattactgtgcgagagaggccaaggggtactactacggtatggacgtctggggccaagggaccacggtcaccgtctcgagtggtggtggcggatccggtggtggcggttctggtggtggcggctcccagcctgtgctgactcagtcaccctcagtgtccgtgtccccaggacagacagccagcatcacctgctctggagataaattgggggatacatatgcttgctggtatcagcagaagccaggccagtcccctgtgctggtcatctatcaagataccaagcggccctcagggatccctgagcgattctctggctccaactctgggaacacagccactctgaccatcagcgggacccaggctatggatgaggctgactattactgtcaggcgtgggacagcagcactgtggtattcggcggagggaccaagctgaccgtcctaaccacgacgccagcgccgcgaccaccaacaccggcgcccaccatcgcgtcgcagcccctgtccctgcgcccagaggcgtgccggccagcggcggggggcgcagtgcacacgagggggctggacttcgcctgtgatatctacatctgggcgcccttggccgggacttgtggggtccttctcctgtcactggttatcaccctttactgcggtggtggcggttctggtggtggcggtagtggcggcggaggaagcggtggtggcggttccggatctatgcgtaaaggcgaagagctgttcactggtgtcgtccctattctggtggaactggatggtgatgtcaacggtcataagttttccgtgcgtggcgagggtgaaggtgacgcaactaatggtaaactgacgctgaagttcatctgtactactggtaaactgccggtaccttggccgactctggtaacgacgctgacttatggtgttcagtgctttgctcgttatccggaccatatgaagcagcatgacttcttcaagtccgccatgccggaaggctatgtgcaggaacgcacgatttcctttaaggatgacggcacgtacaaaacgcgtgcggaagtgaaatttgaaggcgataccctggtaaaccgcattgagctgaaaggcattgactttaaagaagacggcaatatcctgggccataagctggaatacaattttaacagccacaatgtttacatcaccgccgataaacaaaaaaatggcattaaagcgaattttaaaattcgccacaacgtggaggatggcagcgtgcagctggctgatcactaccagcaaaacactccaatcggtgatggtcctgttctgctgccagacaatcactatctgagcacgcaaagcgttctgtctaaagatccgaacgagaaacgcgatcatatggttctgctggagttcgtaaccgcagcgggcatcacgcatggtatggatgaactgtacaaatgataa

SEQ ID NO: 833 - protein, 331 aa, Artificial Sequence
  anti-SIRPa agonist_vHL_aa_NO_GFP
MALPVTALLLPLALLLHAARPQVQLVESEGGLVQPGGSLRLSCAASGFTFSSYEMNWVRQAPGKGLEWVSYISSSGSTIYYADSVKGRFTISRDNAKNSLYLQMNSLRAEDTAVYYCAREAKGYYYGMDVWGQGTTVTVSSGGGGSGGGGSGGGGSQPVLTQSPSVSVSPGQTASITCSGDKLGDTYACWYQQKPGQSPVLVIYQDTKRPSGIPERFSGSNSGNTATLTISGTQAMDEADYYCQAWDSSTVVFGGGTKLTVLTTTPAPRPPTPAPTIASQPLSLRPEACRPAAGGAVHTRGLDFACDIYIWAPLAGTCGVLLLSLVITLYC

SEQ ID NO: 834 - DNA, 993 bp, Artificial Sequence
  anti-SIRPa aonist_vHL_NT_NO_GFP
atggcactccccgtaactgctctgctgctgccgttggcattgctcctgcacgccgcacgcccgcaggtgcagctggtggagtctgagggaggcttggtacagcctggagggtccctgagactctcctgtgcagcctctggattcaccttcagtagttatgaaatgaactgggtccgccaggctccagggaaggggctggagtgggtttcatacattagtagtagtggtagtaccatatactacgcagactctgtgaagggccgattcaccatctccagagacaacgccaagaactcactgtatctgcaaatgaacagcctgagagccgaggacacggctgtttattactgtgcgagagaggccaaggggtactactacggtatggacgtctggggccaagggaccacggtcaccgtctcgagtggtggtggcggatccggtggtggcggttctggtggtggcggctcccagcctgtgctgactcagtcaccctcagtgtccgtgtccccaggacagacagccagcatcacctgctctggagataaattgggggatacatatgcttgctggtatcagcagaagccaggccagtcccctgtgctggtcatctatcaagataccaagcggccctcagggatccctgagcgattctctggctccaactctgggaacacagccactctgaccatcagcgggacccaggctatggatgaggctgactattactgtcaggcgtgggacagcagcactgtggtattcggcggagggaccaagctgaccgtcctaaccacgacgccagcgccgcgaccaccaacaccggcgcccaccatcgcgtcgcagcccctgtccctgcgcccagaggcgtgccggccagcggcggggggcgcagtgcacacgagggggctggacttcgcctgtgatatctacatctgggcgcccttggccgggacttgtggggtccttctcctgtcactggttatcaccctttactgc

SEQ ID NO: 835 - protein, 724 aa, Artificial Sequence
  HTLV1_fGP62_sfGFP_aa
MALPVTALLLPLALLLHAARPDYSPSCCTLTIGVSSYHSKPCNPAQPVCSWTLDLLALSADQALQPPCPNLVSYSSYHATYSLYLFPHWTKKPNRNGGGYYSASYSDPCSLKCPYLGCQSWTCPYTGAVSSPYWKFQHDVNFTQEVSRLNINLHFSKCGFPFSLLVDAPGYDPIWFLNTEPSQLPPTAPPLLPHSNLDHILEPSIPWKSKLLTLVQLTLQSTNYTCIVCIDRASLSTWHVLYSPNVSVPSSSSTPLLYPSLALPAPHLTLPFNWTHCFDPQIQAIVSSPCHNSLILPPFSLSPVPTLGSRSRRAVPVAVWLVSALAMGAGVAGGITGSMSLASGKSLLHEVDKDISQLTQAIVKNHKNLLKIAQYAAQNRRGLDLLFWEQGGLCKALQEQCRFPNITNSHVPILQERPPLENRVLTGWGLNWDLGLSQWAREALQTGITLVALLLLVILAGPCIGGGGSGGGGSGGGGSGGGGSGSMRKGEELFTGVVPILVELDGDVNGHKFSVRGEGEGDATNGKLTLKFICTTGKLPVPWPTLVTTLTYGVQCFARYPDHMKQHDFFKSAMPEGYVQERTISFKDDGTYKTRAEVKFEGDTLVNRIELKGIDFKEDGNILGHKLEYNFNSHNVYITADKQKNGIKANFKIRHNVEDGSVQLADHYQQNTPIGDGPVLLPDNHYLSTQSVLSKDPNEKRDHMVLLEFVTAAGITHGMDELYK

SEQ ID NO: 836 - DNA, 2178 bp, Artificial Sequence
  HTLV1_fGP62_sfGFP
atggcactccccgtaactgctctgctgctgccgttggcattgctcctgcacgccgcacgcccggattacagccccagctgctgtactctcacaattggagtctcctcataccactctaaaccctgcaatcctgcccagccagtttgttcgtggaccctcgacctgctggccctttcagcagatcaggccctacagcccccctgccctaacctagtaagttactccagctaccatgccacctattccctatatctattccctcattggactaagaagccaaaccgaaatggcggaggctattattcagcctcttattcagacccttgttccttaaagtgcccatacctggggtgccaatcatggacctgcccctatacaggagccgtctccagcccctactggaagtttcaacacgatgtcaattttactcaagaagtttcacgcctcaatattaatctccatttttcaaaatgcggttttcccttctcccttctagtcgacgctccaggatatgaccccatctggttccttaataccgaacccagccaactgcctcccaccgcccctcctctactcccccactctaacctagaccacatcctcgagccctctataccatggaaatcaaaactcctgacccttgtccagttaaccctacaaagcactaattatacttgcattgtctgtatcgatcgtgccagcctctccacttggcacgtcctatactctcccaacgtctctgttccatcctcttcttctacccccctcctttacccatcgttagcgcttccagccccccacctgacgttaccatttaactggacccactgctttgacccccagattcaagctatagtctcctccccctgtcataactccctcatcctgccccccttttccttgtcacctgttcccaccctaggatcccgctcccgccgagcggtaccggtggcggtctggcttgtctccgccctggccatgggagccggagtggctggcgggattaccggctccatgtccctcgcctcaggaaagagcctcctacatgaggtggacaaagatatttcccagttaactcaagcaatagtcaaaaaccacaaaaatctactcaaaattgcgcagtatgctgcccagaacagacgaggccttgatctcctgttctgggagcaaggaggattatgcaaagcattacaagaacagtgccgttttccgaatattaccaattcccatgtcccaatactacaagaaagacccccccttgagaatcgagtcctgactggctggggccttaactgggaccttggcctctcacagtgggctcgagaggccttacaaactggaatcacccttgttgcgctactccttcttgttatccttgcaggaccatgcatcggtggtggcggttctggtggtggcggtagtggcggcggaggaagcggtggtggcggttccggatctatgcgtaaaggcgaagagctgttcactggtgtcgtccctattctggtggaactggatggtgatgtcaacggtcataagttttccgtgcgtggcgagggtgaaggtgacgcaactaatggtaaactgacgctgaagttcatctgtactactggtaaactgccggtaccttggccgactctggtaacgacgctgacttatggtgttcagtgctttgctcgttatccggaccatatgaagcagcatgacttcttcaagtccgccatgccggaaggctatgtgcaggaacgcacgatttcctttaaggatgacggcacgtacaaaacgcgtgcggaagtgaaatttgaaggcgataccctggtaaaccgcattgagctgaaaggcattgactttaaagaagacggcaatatcctgggccataagctggaatacaattttaacagccacaatgtttacatcaccgccgataaacaaaaaaatggcattaaagcgaattttaaaattcgccacaacgtggaggatggcagcgtgcagctggctgatcactaccagcaaaacactccaatcggtgatggtcctgttctgctgccagacaatcactatctgagcacgcaaagcgttctgtctaaagatccgaacgagaaacgcgatcatatggttctgctggagttcgtaaccgcagcgggcatcacgcatggtatggatgaactgtacaaatgataa

SEQ ID NO: 837 - protein, 464 aa, Artificial Sequence
  HTLV1_fGP62_aa_NO_GFP
MALPVTALLLPLALLLHAARPDYSPSCCTLTIGVSSYHSKPCNPAQPVCSWTLDLLALSADQALQPPCPNLVSYSSYHATYSLYLFPHWTKKPNRNGGGYYSASYSDPCSLKCPYLGCQSWTCPYTGAVSSPYWKFQHDVNFTQEVSRLNINLHFSKCGFPFSLLVDAPGYDPIWFLNTEPSQLPPTAPPLLPHSNLDHILEPSIPWKSKLLTLVQLTLQSTNYTCIVCIDRASLSTWHVLYSPNVSVPSSSSTPLLYPSLALPAPHLTLPFNWTHCFDPQIQAIVSSPCHNSLILPPFSLSPVPTLGSRSRRAVPVAVWLVSALAMGAGVAGGITGSMSLASGKSLLHEVDKDISQLTQAIVKNHKNLLKIAQYAAQNRRGLDLLFWEQGGLCKALQEQCRFPNITNSHVPILQERPPLENRVLTGWGLNWDLGLSQWAREALQTGITLVALLLLVILAGPCI

SEQ ID NO: 838 - DNA, 1392 bp, Artificial Sequence
  HTLV1_fGP62_NO_GFP
atggcactccccgtaactgctctgctgctgccgttggcattgctcctgcacgccgcacgcccggattacagccccagctgctgtactctcacaattggagtctcctcataccactctaaaccctgcaatcctgcccagccagtttgttcgtggaccctcgacctgctggccctttcagcagatcaggccctacagcccccctgccctaacctagtaagttactccagctaccatgccacctattccctatatctattccctcattggactaagaagccaaaccgaaatggcggaggctattattcagcctcttattcagacccttgttccttaaagtgcccatacctggggtgccaatcatggacctgcccctatacaggagccgtctccagcccctactggaagtttcaacacgatgtcaattttactcaagaagtttcacgcctcaatattaatctccatttttcaaaatgcggttttcccttctcccttctagtcgacgctccaggatatgaccccatctggttccttaataccgaacccagccaactgcctcccaccgcccctcctctactcccccactctaacctagaccacatcctcgagccctctataccatggaaatcaaaactcctgacccttgtccagttaaccctacaaagcactaattatacttgcattgtctgtatcgatcgtgccagcctctccacttggcacgtcctatactctcccaacgtctctgttccatcctcttcttctacccccctcctttacccatcgttagcgcttccagccccccacctgacgttaccatttaactggacccactgctttgacccccagattcaagctatagtctcctccccctgtcataactccctcatcctgccccccttttccttgtcacctgttcccaccctaggatcccgctcccgccgagcggtaccggtggcggtctggcttgtctccgccctggccatgggagccggagtggctggcgggattaccggctccatgtccctcgcctcaggaaagagcctcctacatgaggtggacaaagatatttcccagttaactcaagcaatagtcaaaaaccacaaaaatctactcaaaattgcgcagtatgctgcccagaacagacgaggccttgatctcctgttctgggagcaaggaggattatgcaaagcattacaagaacagtgccgttttccgaatattaccaattcccatgtcccaatactacaagaaagacccccccttgagaatcgagtcctgactggctggggccttaactgggaccttggcctctcacagtgggctcgagaggccttacaaactggaatcacccttgttgcgctactccttcttgttatccttgcaggaccatgcatc

SEQ ID NO: 839 - protein, 432 aa, Artificial Sequence
  HTLV1_GP21_sfGFP_aa
MALPVTALLLPLALLLHAARPAVPVAVWLVSALAMGAGVAGGITGSMSLASGKSLLHEVDKDISQLTQAIVKNHKNLLKIAQYAAQNRRGLDLLFWEQGGLCKALQEQCRFPNITNSHVPILQERPPLENRVLTGWGLNWDLGLSQWAREALQTGITLVALLLLVILAGPCIGGGGSGGGGSGGGGSGGGGSGSMRKGEELFTGVVPILVELDGDVNGHKFSVRGEGEGDATNGKLTLKFICTTGKLPVPWPTLVTTLTYGVQCFARYPDHMKQHDFFKSAMPEGYVQERTISFKDDGTYKTRAEVKFEGDTLVNRIELKGIDFKEDGNILGHKLEYNFNSHNVYITADKQKNGIKANFKIRHNVEDGSVQLADHYQQNTPIGDGPVLLPDNHYLSTQSVLSKDPNEKRDHMVLLEFVTAAGITHGMDELYK

SEQ ID NO: 840 - DNA, 1302 bp, Artificial Sequence
  HTLV1_GP21_sfGFP
atggcactccccgtaactgctctgctgctgccgttggcattgctcctgcacgccgcacgcccggcggtaccggtggcggtctggcttgtctccgccctggccatgggagccggagtggctggcgggattaccggctccatgtccctcgcctcaggaaagagcctcctacatgaggtggacaaagatatttcccagttaactcaagcaatagtcaaaaaccacaaaaatctactcaaaattgcgcagtatgctgcccagaacagacgaggccttgatctcctgttctgggagcaaggaggattatgcaaagcattacaagaacagtgccgttttccgaatattaccaattcccatgtcccaatactacaagaaagacccccccttgagaatcgagtcctgactggctggggccttaactgggaccttggcctctcacagtgggctcgagaggccttacaaactggaatcacccttgttgcgctactccttcttgttatccttgcaggaccatgcatcggtggtggcggttctggtggtggcggtagtggcggcggaggaagcggtggtggcggttccggatctatgcgtaaaggcgaagagctgttcactggtgtcgtccctattctggtggaactggatggtgatgtcaacggtcataagttttccgtgcgtggcgagggtgaaggtgacgcaactaatggtaaactgacgctgaagttcatctgtactactggtaaactgccggtaccttggccgactctggtaacgacgctgacttatggtgttcagtgctttgctcgttatccggaccatatgaagcagcatgacttcttcaagtccgccatgccggaaggctatgtgcaggaacgcacgatttcctttaaggatgacggcacgtacaaaacgcgtgcggaagtgaaatttgaaggcgataccctggtaaaccgcattgagctgaaaggcattgactttaaagaagacggcaatatcctgggccataagctggaatacaattttaacagccacaatgtttacatcaccgccgataaacaaaaaaatggcattaaagcgaattttaaaattcgccacaacgtggaggatggcagcgtgcagctggctgatcactaccagcaaaacactccaatcggtgatggtcctgttctgctgccagacaatcactatctgagcacgcaaagcgttctgtctaaagatccgaacgagaaacgcgatcatatggttctgctggagttcgtaaccgcagcgggcatcacgcatggtatggatgaactgtacaaatgataa

SEQ ID NO: 841 - protein, 172 aa, Artificial Sequence
  HTLV1_GP21_aa_NO_GFP
MALPVTALLLPLALLLHAARPAVPVAVWLVSALAMGAGVAGGITGSMSLASGKSLLHEVDKDISQLTQAIVKNHKNLLKIAQYAAQNRRGLDLLFWEQGGLCKALQEQCRFPNITNSHVPILQERPPLENRVLTGWGLNWDLGLSQWAREALQTGITLVALLLLVILAGPCI

SEQ ID NO: 842 - DNA, 516 bp, Artificial Sequence
  HTLV1_GP21_NO_GFP
atggcactccccgtaactgctctgctgctgccgttggcattgctcctgcacgccgcacgcccggcggtaccggtggcggtctggcttgtctccgccctggccatgggagccggagtggctggcgggattaccggctccatgtccctcgcctcaggaaagagcctcctacatgaggtggacaaagatatttcccagttaactcaagcaatagtcaaaaaccacaaaaatctactcaaaattgcgcagtatgctgcccagaacagacgaggccttgatctcctgttctgggagcaaggaggattatgcaaagcattacaagaacagtgccgttttccgaatattaccaattcccatgtcccaatactacaagaaagacccccccttgagaatcgagtcctgactggctggggccttaactgggaccttggcctctcacagtgggctcgagaggccttacaaactggaatcacccttgttgcgctactccttcttgttatccttgcaggaccatgcatc

SEQ ID NO: 843 - protein, 732 aa, Artificial Sequence
  LASV_fGP2_sfGFP_aa
MALPVTALLLPLALLLHAARPGQIVTFFQEVPHVIEEVMNIVLIALSILAILKGLYNVATCGLIGLVTFLLLSGRSCSLIYKGTYELQTLELNMETLNMTMPLSCTKNNSHHYIRVGNETGLELTLTNTSILNHKFCNLSDAHKRNLYDHSLMSIISTFHLSIPNFNQYEAMSCDFNGGKITVQYNLSHSFAVDAAGHCGTLANGVLQTFMRMAWGGSYIALDSGRGNWDCIMTSYQYLIIQNTTWDDHCQFSRPSPIGYLGLLSQRTRDIYISRRLLGTFTWTLSDSEGKDTPGGYCLTRWMLIEAELKCFGNTAVAKCNEKHDEEFCDMLRLFDFNKQAIRRLKTEAQMSIQLINKAVNALINDQLIMKNHLRDIMGIPYCNYSRYWYLNHTSTGKTSLPRCWLISNGSYLNETKFSDDIEQQADNMITEMLQKEYIDRQGKTPLGLVDLFVFSTSFYLISIFLHLVKIPGGGGSGGGGSGGGGSGGGGSGSMRKGEELFTGVVPILVELDGDVNGHKFSVRGEGEGDATNGKLTLKFICTTGKLPVPWPTLVTTLTYGVQCFARYPDHMKQHDFFKSAMPEGYVQERTISFKDDGTYKTRAEVKFEGDTLVNRIELKGIDFKEDGNILGHKLEYNFNSHNVYITADKQKNGIKANFKIRHNVEDGSVQLADHYQQNTPIGDGPVLLPDNHYLSTQSVLSKDPNEKRDHMVLLEFVTAAGITHGMDELYK

SEQ ID NO: 844 - DNA, 2202 bp, Artificial Sequence
  LASV_fGP2_sfGFP
atggcactccccgtaactgctctgctgctgccgttggcattgctcctgcacgccgcacgcccgggacagattgtgacattcttccaagaagttcctcatgttattgaggaagtgatgaatattgtccttattgcactatccatcctagcaattctgaagggactatacaatgttgccacgtgtggcttgatagggcttgtcacattccttctactttcaggaaggtcatgctcactgatctacaaagggacttacgagctgcaaacccttgagttgaatatggagactcttaatatgaccatgccgctatcctgcacaaagaacaacagtcatcattatataagggtggggaatgagacaggacttgagctcaccttgaccaacaccagcattcttaatcacaaattctgtaacctctctgatgcccacaaaaggaatctttatgatcacagcctcatgagtatcatctctacctttcatctgtccattcccaacttcaatcaatatgaggcaatgagctgcgatttcaatggggggaaaatcactgtgcaatacaacctgagtcatagcttcgcagtggatgcagcaggtcactgcggcacacttgcaaatggtgtcttacaaacatttatgagaatggcttggggagggagttatattgctcttgattctggacgcggtaactgggactgtataatgaccagttaccaatatctaatcattcagaatacaacctgggatgaccactgccaattttccagaccatcacctattggctaccttgggcttctctcacaaagaactagagacatatacattagcagaaggttgttggggacattcacctggacactatcagactcagagggaaaagacacaccagggggatactgccttactagatggatgttgattgaggccgaattaaagtgctttggaaacactgcagtagccaagtgcaatgagaaacatgatgaagaattttgtgacatgctaaggttgttcgatttcaacaaacaggccataaggaggctcaaaacagaggcccaaatgagcatacagctgatcaacaaggctgtcaatgctttaataaatgatcagctcatcatgaagaaccacttgagagacatcatgggcataccatattgtaactacagcagatattggtaccttaaccacacatcaacaggaaagacctcactaccaaggtgttggcttatctcaaatggatcatatctcaatgagaccaagttttcagatgacatcgaacaacaagctgacaacatgataacagagatgctacaaaaggaatacatagatagacagggcaaaactccactggggttagttgacctatttgtttttagcacaagtttctatctgataagcatctttctccacctggtcaaaataccaggtggtggcggttctggtggtggcggtagtggcggcggaggaagcggtggtggcggttccggatctatgcgtaaaggcgaagagctgttcactggtgtcgtccctattctggtggaactggatggtgatgtcaacggtcataagttttccgtgcgtggcgagggtgaaggtgacgcaactaatggtaaactgacgctgaagttcatctgtactactggtaaactgccggtaccttggccgactctggtaacgacgctgacttatggtgttcagtgctttgctcgttatccggaccatatgaagcagcatgacttcttcaagtccgccatgccggaaggctatgtgcaggaacgcacgatttcctttaaggatgacggcacgtacaaaacgcgtgcggaagtgaaatttgaaggcgataccctggtaaaccgcattgagctgaaaggcattgactttaaagaagacggcaatatcctgggccataagctggaatacaattttaacagccacaatgtttacatcaccgccgataaacaaaaaaatggcattaaagcgaattttaaaattcgccacaacgtggaggatggcagcgtgcagctggctgatcactaccagcaaaacactccaatcggtgatggtcctgttctgctgccagacaatcactatctgagcacgcaaagcgttctgtctaaagatccgaacgagaaacgcgatcatatggttctgctggagttcgtaaccgcagcgggcatcacgcatggtatggatgaactgtacaaatgataa

SEQ ID NO: 845 - protein, 472 aa, Artificial Sequence
  LASV_fGP2_aa_NO_GFP -
MALPVTALLLPLALLLHAARPGQIVTFFQEVPHVIEEVMNIVLIALSILAILKGLYNVATCGLIGLVTFLLLSGRSCSLIYKGTYELQTLELNMETLNMTMPLSCTKNNSHHYIRVGNETGLELTLTNTSILNHKFCNLSDAHKRNLYDHSLMSIISTFHLSIPNFNQYEAMSCDFNGGKITVQYNLSHSFAVDAAGHCGTLANGVLQTFMRMAWGGSYIALDSGRGNWDCIMTSYQYLIIQNTTWDDHCQFSRPSPIGYLGLLSQRTRDIYISRRLLGTFTWTLSDSEGKDTPGGYCLTRWMLIEAELKCFGNTAVAKCNEKHDEEFCDMLRLFDFNKQAIRRLKTEAQMSIQLINKAVNALINDQLIMKNHLRDIMGIPYCNYSRYWYLNHTSTGKTSLPRCWLISNGSYLNETKFSDDIEQQADNMITEMLQKEYIDRQGKTPLGLVDLFVFSTSFYLISIFLHLVKIP

SEQ ID NO: 846 - DNA, 1416 bp, Artificial Sequence
  LASV_fGP2_NT_NO_GFP
atggcactccccgtaactgctctgctgctgccgttggcattgctcctgcacgccgcacgcccgggacagattgtgacattcttccaagaagttcctcatgttattgaggaagtgatgaatattgtccttattgcactatccatcctagcaattctgaagggactatacaatgttgccacgtgtggcttgatagggcttgtcacattccttctactttcaggaaggtcatgctcactgatctacaaagggacttacgagctgcaaacccttgagttgaatatggagactcttaatatgaccatgccgctatcctgcacaaagaacaacagtcatcattatataagggtggggaatgagacaggacttgagctcaccttgaccaacaccagcattcttaatcacaaattctgtaacctctctgatgcccacaaaaggaatctttatgatcacagcctcatgagtatcatctctacctttcatctgtccattcccaacttcaatcaatatgaggcaatgagctgcgatttcaatggggggaaaatcactgtgcaatacaacctgagtcatagcttcgcagtggatgcagcaggtcactgcggcacacttgcaaatggtgtcttacaaacatttatgagaatggcttggggagggagttatattgctcttgattctggacgcggtaactgggactgtataatgaccagttaccaatatctaatcattcagaatacaacctgggatgaccactgccaattttccagaccatcacctattggctaccttgggcttctctcacaaagaactagagacatatacattagcagaaggttgttggggacattcacctggacactatcagactcagagggaaaagacacaccagggggatactgccttactagatggatgttgattgaggccgaattaaagtgctttggaaacactgcagtagccaagtgcaatgagaaacatgatgaagaattttgtgacatgctaaggttgttcgatttcaacaaacaggccataaggaggctcaaaacagaggcccaaatgagcatacagctgatcaacaaggctgtcaatgctttaataaatgatcagctcatcatgaagaaccacttgagagacatcatgggcataccatattgtaactacagcagatattggtaccttaaccacacatcaacaggaaagacctcactaccaaggtgttggcttatctcaaatggatcatatctcaatgagaccaagttttcagatgacatcgaacaacaagctgacaacatgataacagagatgctacaaaaggaatacatagatagacagggcaaaactccactggggttagttgacctatttgtttttagcacaagtttctatctgataagcatctttctccacctggtcaaaatacca

SEQ ID NO: 847 - protein, 920 aa, Artificial Sequence
  SEBOV_fGP_sfGFP_aa
MALPVTALLLPLALLLHAARPMPLGVVTNSTLEVTEIDQLVCKDHLASTDQLKSVGLNLEGSGVSTDIPSATKRWGFRSGVPPKVVSYEAGEWAENCYNLEIKKPDGSECLPPPPDGVRGFPRCRYVHKAQGTGPCPGDYAFHKDGAFFLYDRLASTVIYRGVNFAEGVIAFLILAKPKETFLQSPPIREAVNYTENTSSYYATSYLEYEIENFGAQHSTTLFKIDNNTFVRLDRPHTPQFLFQLNDTIHLHQQLSNTTGRLIWTLDANINADIGEWAFWENKKNLSEQLRGEELSFEALSLNETEDDDAASSRITKGRISDRATRKYSDLVPKNSPGMVPLHIPEGETTLPSQNSTEGRRVGVNTQETITETAATIIGTNGNHMQISTIGIRPSSSQIPSSSPTTAPSPEAQTPTTHTSGPSVMATEEPTTPPGSSPGPTTEAPTLTTPENITTAVKTVLPQESTSNGLITSTVTGILGSLGLRKRSRRQTNTKATGKCNPNLHYWTAQEQHNAAGIAWIPYFGPGAEGIYTEGLMHNQNALVCGLRQLANETTQALQLFLRATTELRTYTILNRKAIDFLLRRWGGTCRILGPDCCIEPHDWTKNITDKINQIIHDFIDNPLPNQDNDDNWWTGWRQWIPAGIGITGIIIAIIALLCVGGGGSGGGGSGGGGSGGGGSGSMRKGEELFTGVVPILVELDGDVNGHKFSVRGEGEGDATNGKLTLKFICTTGKLPVPWPTLVTTLTYGVQCFARYPDHMKQHDFFKSAMPEGYVQERTISFKDDGTYKTRAEVKFEGDTLVNRIELKGIDFKEDGNILGHKLEYNFNSHNVYITADKQKNGIKANFKIRHNVEDGSVQLADHYQQNTPIGDGPVLLPDNHYLSTQSVLSKDPNEKRDHMVLLEFVTAAGITHGMDELYK

SEQ ID NO: 848 - DNA, 2766 bp, Artificial Sequence
  SEBOV_fGP_sfGFP
atggcactccccgtaactgctctgctgctgccgttggcattgctcctgcacgccgcacgcccgatgcctttgggtgttgtgactaacagcactttagaagtaacagagattgaccagctagtctgcaaggatcatcttgcatctactgaccagctgaaatcagttggtctcaacctcgaggggagcggagtatctactgatatcccatctgcaacaaagcgttggggcttcagatctggtgttcctcccaaggtggtcagctatgaagcgggagaatgggctgaaaattgctacaatcttgaaataaagaagccggacgggagcgaatgcttacccccaccgccagatggtgtcagaggctttccaaggtgccgctatgtgcacaaagcccaaggaaccgggccctgcccaggtgactacgcctttcacaaggatggagctttctttctctatgacaggctggcttcaactgtaatttacagaggagtcaattttgctgagggggtgattgcattcttgatattggctaaaccaaaagaaacgttccttcagtcaccccccattcgagaggcagtaaactacactgaaaatacatcaagttattatgccacatcctacttggagtatgaaatcgaaaattttggtgctcaacactccacgacccttttcaaaattgacaataatacttttgttcgtctggacaggccccacacgcctcagttccttttccagctgaacgacaccattcaccttcaccaacagttgagtaatacaactgggagactaatttggacactagatgctaatatcaatgctgatattggtgaatgggctttttgggaaaataaaaaaaacctgagcgaacagctgcgtggagaagagctgtctttcgaagctttatcgctcaacgagacagaagacgatgatgcggcatcgtcgagaattacaaagggaagaatctccgaccgggccaccaggaagtattcggacctggttccaaagaattcccctgggatggttccattgcacataccagaaggggaaacaacattgccgtctcagaattcgacagaaggtcgaagagtaggtgtgaacactcaggagaccatcacagagacagctgcaacaattataggcactaacggcaaccatatgcagatctccaccatcgggataagaccgagctccagccaaatcccgagttcctcaccgaccacggcaccaagccctgaggctcagacccccacaacccacacatcaggtccatcagtgatggccaccgaggaaccaacaacaccaccgggaagctcccccggcccaacaacagaagcacccactctcaccaccccagaaaatataacaacagcggttaaaactgtcctgccacaggagtccacaagcaacggtctaataacttcaacagtaacagggattcttgggagtcttgggcttcgaaaacgcagcagaagacaaactaacaccaaagccacgggtaagtgcaatcccaacttacactactggactgcacaagaacaacataatgctgctgggattgcctggatcccgtactttggaccgggtgcggaaggcatatacactgaaggcctgatgcataaccaaaatgccttagtctgtggacttaggcaacttgcaaatgaaacaactcaagctctgcagcttttcttaagagccacaacggagctgcggacatataccatactcaacaggaaggccatagatttccttctgcgacgatggggcgggacatgcaggatcctgggaccagattgttgcattgagccacatgattggacaaaaaacatcactgataaaatcaaccaaatcatccatgatttcatcgacaaccccttacctaatcaggataatgatgataattggtggacaggctggagacagtggatccctgcaggaataggcattactggaattattattgcaattattgctcttctttgcgttggtggtggcggttctggtggtggcggtagtggcggcggaggaagcggtggtggcggttccggatctatgcgtaaaggcgaagagctgttcactggtgtcgtccctattctggtggaactggatggtgatgtcaacggtcataagttttccgtgcgtggcgagggtgaaggtgacgcaactaatggtaaactgacgctgaagttcatctgtactactggtaaactgccggtaccttggccgactctggtaacgacgctgacttatggtgttcagtgctttgctcgttatccggaccatatgaagcagcatgacttcttcaagtccgccatgccggaaggctatgtgcaggaacgcacgatttcctttaaggatgacggcacgtacaaaacgcgtgcggaagtgaaatttgaaggcgataccctggtaaaccgcattgagctgaaaggcattgactttaaagaagacggcaatatcctgggccataagctggaatacaattttaacagccacaatgtttacatcaccgccgataaacaaaaaaatggcattaaagcgaattttaaaattcgccacaacgtggaggatggcagcgtgcagctggctgatcactaccagcaaaacactccaatcggtgatggtcctgttctgctgccagacaatcactatctgagcacgcaaagcgttctgtctaaagatccgaacgagaaacgcgatcatatggttctgctggagttcgtaaccgcagcgggcatcacgcatggtatggatgaactgtacaaatgataa

SEQ ID NO: 849 - protein, 660 aa, Artificial Sequence
  SEBOV_fGP_aa_NO_GFP
MALPVTALLLPLALLLHAARPMPLGVVTNSTLEVTEIDQLVCKDHLASTDQLKSVGLNLEGSGVSTDIPSATKRWGFRSGVPPKVVSYEAGEWAENCYNLEIKKPDGSECLPPPPDGVRGFPRCRYVHKAQGTGPCPGDYAFHKDGAFFLYDRLASTVIYRGVNFAEGVIAFLILAKPKETFLQSPPIREAVNYTENTSSYYATSYLEYEIENFGAQHSTTLFKIDNNTFVRLDRPHTPQFLFQLNDTIHLHQQLSNTTGRLIWTLDANINADIGEWAFWENKKNLSEQLRGEELSFEALSLNETEDDDAASSRITKGRISDRATRKYSDLVPKNSPGMVPLHIPEGETTLPSQNSTEGRRVGVNTQETITETAATIIGTNGNHMQISTIGIRPSSSQIPSSSPTTAPSPEAQTPTTHTSGPSVMATEEPTTPPGSSPGPTTEAPTLTTPENITTAVKTVLPQESTSNGLITSTVTGILGSLGLRKRSRRQTNTKATGKCNPNLHYWTAQEQHNAAGIAWIPYFGPGAEGIYTEGLMHNQNALVCGLRQLANETTQALQLFLRATTELRTYTILNRKAIDFLLRRWGGTCRILGPDCCIEPHDWTKNITDKINQIIHDFIDNPLPNQDNDDNWWTGWRQWIPAGIGITGIIIAIIALLCV

SEQ ID NO: 850 - DNA, 1980 bp, Artificial Sequence
  SEBOV_fGP_NT_NO_GFP
atggcactccccgtaactgctctgctgctgccgttggcattgctcctgcacgccgcacgcccgatgcctttgggtgttgtgactaacagcactttagaagtaacagagattgaccagctagtctgcaaggatcatcttgcatctactgaccagctgaaatcagttggtctcaacctcgaggggagcggagtatctactgatatcccatctgcaacaaagcgttggggcttcagatctggtgttcctcccaaggtggtcagctatgaagcgggagaatgggctgaaaattgctacaatcttgaaataaagaagccggacgggagcgaatgcttacccccaccgccagatggtgtcagaggctttccaaggtgccgctatgtgcacaaagcccaaggaaccgggccctgcccaggtgactacgcctttcacaaggatggagctttctttctctatgacaggctggcttcaactgtaatttacagaggagtcaattttgctgagggggtgattgcattcttgatattggctaaaccaaaagaaacgttccttcagtcaccccccattcgagaggcagtaaactacactgaaaatacatcaagttattatgccacatcctacttggagtatgaaatcgaaaattttggtgctcaacactccacgacccttttcaaaattgacaataatacttttgttcgtctggacaggccccacacgcctcagttccttttccagctgaacgacaccattcaccttcaccaacagttgagtaatacaactgggagactaatttggacactagatgctaatatcaatgctgatattggtgaatgggctttttgggaaaataaaaaaaacctgagcgaacagctgcgtggagaagagctgtctttcgaagctttatcgctcaacgagacagaagacgatgatgcggcatcgtcgagaattacaaagggaagaatctccgaccgggccaccaggaagtattcggacctggttccaaagaattcccctgggatggttccattgcacataccagaaggggaaacaacattgccgtctcagaattcgacagaaggtcgaagagtaggtgtgaacactcaggagaccatcacagagacagctgcaacaattataggcactaacggcaaccatatgcagatctccaccatcgggataagaccgagctccagccaaatcccgagttcctcaccgaccacggcaccaagccctgaggctcagacccccacaacccacacatcaggtccatcagtgatggccaccgaggaaccaacaacaccaccgggaagctcccccggcccaacaacagaagcacccactctcaccaccccagaaaatataacaacagcggttaaaactgtcctgccacaggagtccacaagcaacggtctaataacttcaacagtaacagggattcttgggagtcttgggcttcgaaaacgcagcagaagacaaactaacaccaaagccacgggtaagtgcaatcccaacttacactactggactgcacaagaacaacataatgctgctgggattgcctggatcccgtactttggaccgggtgcggaaggcatatacactgaaggcctgatgcataaccaaaatgccttagtctgtggacttaggcaacttgcaaatgaaacaactcaagctctgcagcttttcttaagagccacaacggagctgcggacatataccatactcaacaggaaggccatagatttccttctgcgacgatggggcgggacatgcaggatcctgggaccagattgttgcattgagccacatgattggacaaaaaacatcactgataaaatcaaccaaatcatccatgatttcatcgacaaccccttacctaatcaggataatgatgataattggtggacaggctggagacagtggatccctgcaggaataggcattactggaattattattgcaattattgctcttctttgcgtt

SEQ ID NO: 851 - protein, 451 aa, Artificial Sequence
  SEBOV_GP2_sfGFP_aa
MALPVTALLLPLALLLHAARPQTNTKATGKCNPNLHYWTAQEQHNAAGIAWIPYFGPGAEGIYTEGLMHNQNALVCGLRQLANETTQALQLFLRATTELRTYTILNRKAIDFLLRRWGGTCRILGPDCCIEPHDWTKNITDKINQIIHDFIDNPLPNQDNDDNWWTGWRQWIPAGIGITGIIIAIIALLCVGGGGSGGGGSGGGGSGGGGSGSMRKGEELFTGVVPILVELDGDVNGHKFSVRGEGEGDATNGKLTLKFICTTGKLPVPWPTLVTTLTYGVQCFARYPDHMKQHDFFKSAMPEGYVQERTISFKDDGTYKTRAEVKFEGDTLVNRIELKGIDFKEDGNILGHKLEYNFNSHNVYITADKQKNGIKANFKIRHNVEDGSVQLADHYQQNTPIGDGPVLLPDNHYLSTQSVLSKDPNEKRDHMVLLEFVTAAGITHGMDELYK

SEQ ID NO: 852 - DNA, 1359 bp, Artificial Sequence
  SEBOV_GP2_sfGFP
atggcactccccgtaactgctctgctgctgccgttggcattgctcctgcacgccgcacgcccgcaaactaacaccaaagccacgggtaagtgcaatcccaacttacactactggactgcacaagaacaacataatgctgctgggattgcctggatcccgtactttggaccgggtgcggaaggcatatacactgaaggcctgatgcataaccaaaatgccttagtctgtggacttaggcaacttgcaaatgaaacaactcaagctctgcagcttttcttaagagccacaacggagctgcggacatataccatactcaacaggaaggccatagatttccttctgcgacgatggggcgggacatgcaggatcctgggaccagattgttgcattgagccacatgattggacaaaaaacatcactgataaaatcaaccaaatcatccatgatttcatcgacaaccccttacctaatcaggataatgatgataattggtggacaggctggagacagtggatccctgcaggaataggcattactggaattattattgcaattattgctcttctttgcgttggtggtggcggttctggtggtggcggtagtggcggcggaggaagcggtggtggcggttccggatctatgcgtaaaggcgaagagctgttcactggtgtcgtccctattctggtggaactggatggtgatgtcaacggtcataagttttccgtgcgtggcgagggtgaaggtgacgcaactaatggtaaactgacgctgaagttcatctgtactactggtaaactgccggtaccttggccgactctggtaacgacgctgacttatggtgttcagtgctttgctcgttatccggaccatatgaagcagcatgacttcttcaagtccgccatgccggaaggctatgtgcaggaacgcacgatttcctttaaggatgacggcacgtacaaaacgcgtgcggaagtgaaatttgaaggcgataccctggtaaaccgcattgagctgaaaggcattgactttaaagaagacggcaatatcctgggccataagctggaatacaattttaacagccacaatgtttacatcaccgccgataaacaaaaaaatggcattaaagcgaattttaaaattcgccacaacgtggaggatggcagcgtgcagctggctgatcactaccagcaaaacactccaatcggtgatggtcctgttctgctgccagacaatcactatctgagcacgcaaagcgttctgtctaaagatccgaacgagaaacgcgatcatatggttctgctggagttcgtaaccgcagcgggcatcacgcatggtatggatgaactgtacaaatgataa

SEQ ID NO: 853 - protein, 191 aa, Artificial Sequence
  SEBOV_GP2_aa_NO_GFP
MALPVTALLLPLALLLHAARPQTNTKATGKCNPNLHYWTAQEQHNAAGIAWIPYFGPGAEGIYTEGLMHNQNALVCGLRQLANETTQALQLFLRATTELRTYTILNRKAIDFLLRRWGGTCRILGPDCCIEPHDWTKNITDKINQIIHDFIDNPLPNQDNDDNWWTGWRQWIPAGIGITGIIIAIIALLCV

SEQ ID NO: 854 - DNA, 573 bp, Artificial Sequence
  SEBOV_GP2_NT_NO_GFP
atggcactccccgtaactgctctgctgctgccgttggcattgctcctgcacgccgcacgcccgcaaactaacaccaaagccacgggtaagtgcaatcccaacttacactactggactgcacaagaacaacataatgctgctgggattgcctggatcccgtactttggaccgggtgcggaaggcatatacactgaaggcctgatgcataaccaaaatgccttagtctgtggacttaggcaacttgcaaatgaaacaactcaagctctgcagcttttcttaagagccacaacggagctgcggacatataccatactcaacaggaaggccatagatttccttctgcgacgatggggcgggacatgcaggatcctgggaccagattgttgcattgagccacatgattggacaaaaaacatcactgataaaatcaaccaaatcatccatgatttcatcgacaaccccttacctaatcaggataatgatgataattggtggacaggctggagacagtggatccctgcaggaataggcattactggaattattattgcaattattgctcttctttgcgtt

SEQ ID NO: 855 - protein, 830 aa, Artificial Sequence
  SCoV_S2_sfGFP_aa
MALPVTALLLPLALLLHAARPSTSQKSIVAYTMSLGADSSIAYSNNTIAIPTNFSISITTEVMPVSMAKTSVDCNMYICGDSTECANLLLQYGSFCTQLNRALSGIAAEQDRNTREVFAQVKQMYKTPTLKYFGGFNFSQILPDPLKPTKRSFIEDLLFNKVTLADAGFMKQYGECLGDINARDLICAQKFNGLTVLPPLLTDDMIAAYTAALVSGTATAGWTFGAGAALQIPFAMQMAYRFNGIGVTQNVLYENQKQIANQFNKAISQIQESLTTTSTALGKLQDVVNQNAQALNTLVKQLSSNFGAISSVLNDILSRLDKVEAEVQIDRLITGRLQSLQTYVTQQLIRAAEIRASANLAATKMSECVLGQSKRVDFCGKGYHLMSFPQAAPHGVVFLHVTYVPSQERNFTTAPAICHEGKAYFPREGVFVFNGTSWFITQRNFFSPQIITTDNTFVSGNCDVVIGIINNTVYDPLQPELDSFKEELDKYFKNHTSPDVDLGDISGINASVVNIQKEIDRLNEVAKNLNESLIDLQELGKYEQYIKWPWYVWLGFIAGLIAIVMVTILLGGGGSGGGGSGGGGSGGGGSGSMRKGEELFTGVVPILVELDGDVNGHKFSVRGEGEGDATNGKLTLKFICTTGKLPVPWPTLVTTLTYGVQCFARYPDHMKQHDFFKSAMPEGYVQERTISFKDDGTYKTRAEVKFEGDTLVNRIELKGIDFKEDGNILGHKLEYNFNSHNVYITADKQKNGIKANFKIRHNVEDGSVQLADHYQQNTPIGDGPVLLPDNHYLSTQSVLSKDPNEKRDHMVLLEFVTAAGITHGMDELYK

SEQ ID NO: 856 - DNA, 2496 bp, Artificial Sequence
  SCoV_S2_sfGFP
atggcactccccgtaactgctctgctgctgccgttggcattgctcctgcacgccgcacgcccgagtactagccaaaaatctattgtggcttatactatgtctttaggtgctgatagttcaattgcttactctaataacaccattgctatacctactaacttttcaattagcattactacagaagtaatgcctgtttctatggctaaaacctccgtagattgtaatatgtacatctgcggagattctactgaatgtgctaatttgcttctccaatatggtagcttttgcacacaactaaatcgtgcactctcaggtattgctgctgaacaggatcgcaacacacgtgaagtgttcgctcaagtcaaacaaatgtacaaaaccccaactttgaaatattttggtggttttaatttttcacaaatattacctgaccctctaaagccaactaagaggtcttttattgaggacttgctctttaataaggtgacactcgctgatgctggcttcatgaagcaatatggcgaatgcctaggtgatattaatgctagagatctcatttgtgcgcagaagttcaatggacttacagtgttgccacctctgctcactgatgatatgattgctgcctacactgctgctctagttagtggtactgccactgctggatggacatttggtgctggcgctgctcttcaaataccttttgctatgcaaatggcatataggttcaatggcattggagttacccaaaatgttctctatgagaaccaaaaacaaatcgccaaccaatttaacaaggcgattagtcaaattcaagaatcacttacaacaacatcaactgcattgggcaagctgcaagacgttgttaaccagaatgctcaagcattaaacacacttgttaaacaacttagctctaattttggtgcaatttcaagtgtgctaaatgatatcctttcgcgacttgataaagtcgaggcggaggtacaaattgacaggttaattacaggcagacttcaaagccttcaaacctatgtaacacaacaactaatcagggctgctgaaatcagggcttctgctaatcttgctgctactaaaatgtctgagtgtgttcttggacaatcaaaaagagttgacttttgtggaaagggctaccaccttatgtccttcccacaagcagccccgcatggtgttgtcttcctacatgtcacgtatgtgccatcccaggagaggaacttcaccacagcgccagcaatttgtcatgaaggcaaagcatacttccctcgtgaaggtgtttttgtgtttaatggcacttcttggtttattacacagaggaacttcttttctccacaaataattactacagacaatacatttgtctcaggaaattgtgatgtcgttattggcatcattaacaacacagtttatgatcctctgcaacctgagcttgactcattcaaagaagagctggacaagtacttcaaaaatcatacatcaccagatgttgatcttggcgacatttcaggcattaacgcttctgtcgtcaacattcaaaaagaaattgaccgcctcaatgaggtcgctaaaaatttaaatgaatcactcattgaccttcaagaattgggaaaatatgagcaatatattaaatggccttggtatgtttggctcggcttcattgctggactaattgccatcgtcatggttacaatcttgcttggtggtggcggttctggtggtggcggtagtggcggcggaggaagcggtggtggcggttccggatctatgcgtaaaggcgaagagctgttcactggtgtcgtccctattctggtggaactggatggtgatgtcaacggtcataagttttccgtgcgtggcgagggtgaaggtgacgcaactaatggtaaactgacgctgaagttcatctgtactactggtaaactgccggtaccttggccgactctggtaacgacgctgacttatggtgttcagtgctttgctcgttatccggaccatatgaagcagcatgacttcttcaagtccgccatgccggaaggctatgtgcaggaacgcacgatttcctttaaggatgacggcacgtacaaaacgcgtgcggaagtgaaatttgaaggcgataccctggtaaaccgcattgagctgaaaggcattgactttaaagaagacggcaatatcctgggccataagctggaatacaattttaacagccacaatgtttacatcaccgccgataaacaaaaaaatggcattaaagcgaattttaaaattcgccacaacgtggaggatggcagcgtgcagctggctgatcactaccagcaaaacactccaatcggtgatggtcctgttctgctgccagacaatcactatctgagcacgcaaagcgttctgtctaaagatccgaacgagaaacgcgatcatatggttctgctggagttcgtaaccgcagcgggcatcacgcatggtatggatgaactgtacaaatgataa

SEQ ID NO: 857 - protein, 570 aa, Artificial Sequence
  SCoV_S2_aa_NO_GFP
MALPVTALLLPLALLLHAARPSTSQKSIVAYTMSLGADSSIAYSNNTIAIPTNFSISITTEVMPVSMAKTSVDCNMYICGDSTECANLLLQYGSFCTQLNRALSGIAAEQDRNTREVFAQVKQMYKTPTLKYFGGFNFSQILPDPLKPTKRSFIEDLLFNKVTLADAGFMKQYGECLGDINARDLICAQKFNGLTVLPPLLTDDMIAAYTAALVSGTATAGWTFGAGAALQIPFAMQMAYRFNGIGVTQNVLYENQKQIANQFNKAISQIQESLTTTSTALGKLQDVVNQNAQALNTLVKQLSSNFGAISSVLNDILSRLDKVEAEVQIDRLITGRLQSLQTYVTQQLIRAAEIRASANLAATKMSECVLGQSKRVDFCGKGYHLMSFPQAAPHGVVFLHVTYVPSQERNFTTAPAICHEGKAYFPREGVFVFNGTSWFITQRNFFSPQIITTDNTFVSGNCDVVIGIINNTVYDPLQPELDSFKEELDKYFKNHTSPDVDLGDISGINASVVNIQKEIDRLNEVAKNLNESLIDLQELGKYEQYIKWPWYVWLGFIAGLIAIVMVTILL

SEQ ID NO: 858 - DNA, 1710 bp, Artificial Sequence
  SCoV_S2_NT_NO_GFP
atggcactccccgtaactgctctgctgctgccgttggcattgctcctgcacgccgcacgcccgagtactagccaaaaatctattgtggcttatactatgtctttaggtgctgatagttcaattgcttactctaataacaccattgctatacctactaacttttcaattagcattactacagaagtaatgcctgtttctatggctaaaacctccgtagattgtaatatgtacatctgcggagattctactgaatgtgctaatttgcttctccaatatggtagcttttgcacacaactaaatcgtgcactctcaggtattgctgctgaacaggatcgcaacacacgtgaagtgttcgctcaagtcaaacaaatgtacaaaaccccaactttgaaatattttggtggttttaatttttcacaaatattacctgaccctctaaagccaactaagaggtcttttattgaggacttgctctttaataaggtgacactcgctgatgctggcttcatgaagcaatatggcgaatgcctaggtgatattaatgctagagatctcatttgtgcgcagaagttcaatggacttacagtgttgccacctctgctcactgatgatatgattgctgcctacactgctgctctagttagtggtactgccactgctggatggacatttggtgctggcgctgctcttcaaataccttttgctatgcaaatggcatataggttcaatggcattggagttacccaaaatgttctctatgagaaccaaaaacaaatcgccaaccaatttaacaaggcgattagtcaaattcaagaatcacttacaacaacatcaactgcattgggcaagctgcaagacgttgttaaccagaatgctcaagcattaaacacacttgttaaacaacttagctctaattttggtgcaatttcaagtgtgctaaatgatatcctttcgcgacttgataaagtcgaggcggaggtacaaattgacaggttaattacaggcagacttcaaagccttcaaacctatgtaacacaacaactaatcagggctgctgaaatcagggcttctgctaatcttgctgctactaaaatgtctgagtgtgttcttggacaatcaaaaagagttgacttttgtggaaagggctaccaccttatgtccttcccacaagcagccccgcatggtgttgtcttcctacatgtcacgtatgtgccatcccaggagaggaacttcaccacagcgccagcaatttgtcatgaaggcaaagcatacttccctcgtgaaggtgtttttgtgtttaatggcacttcttggtttattacacagaggaacttcttttctccacaaataattactacagacaatacatttgtctcaggaaattgtgatgtcgttattggcatcattaacaacacagtttatgatcctctgcaacctgagcttgactcattcaaagaagagctggacaagtacttcaaaaatcatacatcaccagatgttgatcttggcgacatttcaggcattaacgcttctgtcgtcaacattcaaaaagaaattgaccgcctcaatgaggtcgctaaaaatttaaatgaatcactcattgaccttcaagaattgggaaaatatgagcaatatattaaatggccttggtatgtttggctcggcttcattgctggactaattgccatcgtcatggttacaatcttgctt

SEQ ID NO: 859 - protein, 872 aa, Artificial Sequence
  LGALS3BP_sfGFP_aa
MALPVTALLLPLALLLHAARPVNDGDMRLADGGATNQGRVEIFYRGQWGTVCDNLWDLTDASVVCRALGFENATQALGRAAFGQGSGPIMLDEVQCTGTEASLADCKSLGWLKSNCRHERDAGVVCTNETRSTHTLDLSRELSEALGQIFDSQRGCDLSISVNVQGEDALGFCGHTVILTANLEAQALWKEPGSNVTMSVDAECVPMVRDLLRYFYSRRIDITLSSVKCFHKLASAYGARQLQGYCASLFAILLPQDPSFQMPLDLYAYAVATGDALLEKLCLQFLAWNFEALTQAEAWPSVPTDLLQLLLPRSDLAVPSELALLKAVDTWSWGERASHEEVEGLVEKIRFPMMLPEELFELQFNLSLYWSHEALFQKKTLQALEFHTVPFQLLARYKGLNLTEDTYKPRIYTSPTWSAFVTDSSWSARKSQLVYQSRRGPLVKYSSDYFQAPSDYRYYPYQSFQTPQHPSFLFQDKRVSWSLVYLPTIQSCWNYGFSCSSDELPVLGLTKSGGSDRTIAYENKALMLCEGLFVADVTDFEGWKAAIPSALDTNSSKSTSSFPCPAGHFNGFRTVIRPFYLTNSSGVDIYIWAPLAGTCGVLLLSLVITLYCGGGGSGGGGSGGGGSGGGGSGSMRKGEELFTGVVPILVELDGDVNGHKFSVRGEGEGDATNGKLTLKFICTTGKLPVPWPTLVTTLTYGVQCFARYPDHMKQHDFFKSAMPEGYVQERTISFKDDGTYKTRAEVKFEGDTLVNRIELKGIDFKEDGNILGHKLEYNFNSHNVYITADKQKNGIKANFKIRHNVEDGSVQLADHYQQNTPIGDGPVLLPDNHYLSTQSVLSKDPNEKRDHMVLLEFVTAAGITHGMDELYK

SEQ ID NO: 860 - DNA, 2622 bp, Artificial Sequence
  LGALS3BP_sfGFP
atggcactccccgtaactgctctgctgctgccgttggcattgctcctgcacgccgcacgcccggtgaacgatggtgacatgcggctggccgatgggggcgccaccaaccagggccgcgtggagatcttctacagaggccagtggggcactgtgtgtgacaacctgtgggacctgactgatgccagcgtcgtctgccgggccctgggcttcgagaacgccacccaggctctgggcagagctgccttcgggcaaggatcaggccccatcatgctggatgaggtccagtgcacgggaaccgaggcctcactggccgactgcaagtccctgggctggctgaagagcaactgcaggcacgagagagacgctggtgtggtctgcaccaatgaaaccaggagcacccacaccctggacctctccagggagctctcggaggcccttggccagatctttgacagccagcggggctgcgacctgtccatcagcgtgaatgtgcagggcgaggacgccctgggcttctgtggccacacggtcatcctgactgccaacctggaggcccaggccctgtggaaggagccgggcagcaatgtcaccatgagtgtggatgctgagtgtgtgcccatggtcagggaccttctcaggtacttctactcccgaaggattgacatcaccctgtcgtcagtcaagtgcttccacaagctggcctctgcctatggggccaggcagctgcagggctactgcgcaagcctctttgccatcctcctcccccaggacccctcgttccagatgcccctggacctgtatgcctatgcagtggccacaggggacgccctgctggagaagctctgcctacagttcctggcctggaacttcgaggccttgacgcaggccgaggcctggcccagtgtccccacagacctgctccaactgctgctgcccaggagcgacctggcggtgcccagcgagctggccctactgaaggccgtggacacctggagctggggggagcgtgcctcccatgaggaggtggagggcttggtggagaagatccgcttccccatgatgctccctgaggagctctttgagctgcagttcaacctgtccctgtactggagccacgaggccctgttccagaagaagactctgcaggccctggaattccacactgtgcccttccagttgctggcccggtacaaaggcctgaacctcaccgaggatacctacaagccccggatttacacctcgcccacctggagtgcctttgtgacagacagttcctggagtgcacggaagtcacaactggtctatcagtccagacgggggcctttggtcaaatattcttctgattacttccaagccccctctgactacagatactacccctaccagtccttccagactccacaacaccccagcttcctcttccaggacaagagggtgtcctggtccctggtctacctccccaccatccagagctgctggaactacggcttctcctgctcctcggacgagctccctgtcctgggcctcaccaagtctggcggctcagatcgcaccattgcctacgaaaacaaagccctgatgctctgcgaagggctcttcgtggcagacgtcaccgatttcgagggctggaaggctgcgattcccagtgccctggacaccaacagctcgaagagcacctcctccttcccctgcccggcagggcacttcaacggcttccgcacggtcatccgccccttctacctgaccaactcctcaggtgtggacatctacatctgggcgcccttggccgggacttgtggggtccttctcctgtcactggttatcaccctttactgcggtggtggcggttctggtggtggcggtagtggcggcggaggaagcggtggtggcggttccggatctatgcgtaaaggcgaagagctgttcactggtgtcgtccctattctggtggaactggatggtgatgtcaacggtcataagttttccgtgcgtggcgagggtgaaggtgacgcaactaatggtaaactgacgctgaagttcatctgtactactggtaaactgccggtaccttggccgactctggtaacgacgctgacttatggtgttcagtgctttgctcgttatccggaccatatgaagcagcatgacttcttcaagtccgccatgccggaaggctatgtgcaggaacgcacgatttcctttaaggatgacggcacgtacaaaacgcgtgcggaagtgaaatttgaaggcgataccctggtaaaccgcattgagctgaaaggcattgactttaaagaagacggcaatatcctgggccataagctggaatacaattttaacagccacaatgtttacatcaccgccgataaacaaaaaaatggcattaaagcgaattttaaaattcgccacaacgtggaggatggcagcgtgcagctggctgatcactaccagcaaaacactccaatcggtgatggtcctgttctgctgccagacaatcactatctgagcacgcaaagcgttctgtctaaagatccgaacgagaaacgcgatcatatggttctgctggagttcgtaaccgcagcgggcatcacgcatggtatggatgaactgtacaaatgataa

SEQ ID NO: 861 - protein, 612 aa, Artificial Sequence
  LGALS3BP_aa_NO_GFP
MALPVTALLLPLALLLHAARPVNDGDMRLADGGATNQGRVEIFYRGQWGTVCDNLWDLTDASVVCRALGFENATQALGRAAFGQGSGPIMLDEVQCTGTEASLADCKSLGWLKSNCRHERDAGVVCTNETRSTHTLDLSRELSEALGQIFDSQRGCDLSISVNVQGEDALGFCGHTVILTANLEAQALWKEPGSNVTMSVDAECVPMVRDLLRYFYSRRIDITLSSVKCFHKLASAYGARQLQGYCASLFAILLPQDPSFQMPLDLYAYAVATGDALLEKLCLQFLAWNFEALTQAEAWPSVPTDLLQLLLPRSDLAVPSELALLKAVDTWSWGERASHEEVEGLVEKIRFPMMLPEELFELQFNLSLYWSHEALFQKKTLQALEFHTVPFQLLARYKGLNLTEDTYKPRIYTSPTWSAFVTDSSWSARKSQLVYQSRRGPLVKYSSDYFQAPSDYRYYPYQSFQTPQHPSFLFQDKRVSWSLVYLPTIQSCWNYGFSCSSDELPVLGLTKSGGSDRTIAYENKALMLCEGLFVADVTDFEGWKAAIPSALDTNSSKSTSSFPCPAGHFNGFRTVIRPFYLTNSSGVDIYIWAPLAGTCGVLLLSLVITLYC

SEQ ID NO: 862 - DNA, 1836 bp, Artificial Sequence
  LGALS3BP_NT_No_GFP
atggcactccccgtaactgctctgctgctgccgttggcattgctcctgcacgccgcacgcccggtgaacgatggtgacatgcggctggccgatgggggcgccaccaaccagggccgcgtggagatcttctacagaggccagtggggcactgtgtgtgacaacctgtgggacctgactgatgccagcgtcgtctgccgggccctgggcttcgagaacgccacccaggctctgggcagagctgccttcgggcaaggatcaggccccatcatgctggatgaggtccagtgcacgggaaccgaggcctcactggccgactgcaagtccctgggctggctgaagagcaactgcaggcacgagagagacgctggtgtggtctgcaccaatgaaaccaggagcacccacaccctggacctctccagggagctctcggaggcccttggccagatctttgacagccagcggggctgcgacctgtccatcagcgtgaatgtgcagggcgaggacgccctgggcttctgtggccacacggtcatcctgactgccaacctggaggcccaggccctgtggaaggagccgggcagcaatgtcaccatgagtgtggatgctgagtgtgtgcccatggtcagggaccttctcaggtacttctactcccgaaggattgacatcaccctgtcgtcagtcaagtgcttccacaagctggcctctgcctatggggccaggcagctgcagggctactgcgcaagcctctttgccatcctcctcccccaggacccctcgttccagatgcccctggacctgtatgcctatgcagtggccacaggggacgccctgctggagaagctctgcctacagttcctggcctggaacttcgaggccttgacgcaggccgaggcctggcccagtgtccccacagacctgctccaactgctgctgcccaggagcgacctggcggtgcccagcgagctggccctactgaaggccgtggacacctggagctggggggagcgtgcctcccatgaggaggtggagggcttggtggagaagatccgcttccccatgatgctccctgaggagctctttgagctgcagttcaacctgtccctgtactggagccacgaggccctgttccagaagaagactctgcaggccctggaattccacactgtgcccttccagttgctggcccggtacaaaggcctgaacctcaccgaggatacctacaagccccggatttacacctcgcccacctggagtgcctttgtgacagacagttcctggagtgcacggaagtcacaactggtctatcagtccagacgggggcctttggtcaaatattcttctgattacttccaagccccctctgactacagatactacccctaccagtccttccagactccacaacaccccagcttcctcttccaggacaagagggtgtcctggtccctggtctacctccccaccatccagagctgctggaactacggcttctcctgctcctcggacgagctccctgtcctgggcctcaccaagtctggcggctcagatcgcaccattgcctacgaaaacaaagccctgatgctctgcgaagggctcttcgtggcagacgtcaccgatttcgagggctggaaggctgcgattcccagtgccctggacaccaacagctcgaagagcacctcctccttcccctgcccggcagggcacttcaacggcttccgcacggtcatccgccccttctacctgaccaactcctcaggtgtggacatctacatctgggcgcccttggccgggacttgtggggtccttctcctgtcactggttatcaccctttactgc

SEQ ID NO: 863 - protein, 336 aa, Artificial Sequence
  CD24_sfGFP_aa
MGRAMVARLGLGLLLLALLLPTQIYSSETTTGTSSNSSQSTSNSGLAPNPTNATTKAAGGALQSTASLFVVSLSLLHLYSEGRGSLLTCGDVEENPGPMRKGEELFTGVVPILVELDGDVNGHKFSVRGEGEGDATNGKLTLKFICTTGKLPVPWPTLVTTLTYGVQCFARYPDHMKQHDFFKSAMPEGYVQERTISFKDDGTYKTRAEVKFEGDTLVNRIELKGIDFKEDGNILGHKLEYNFNSHNVYITADKQKNGIKANFKIRHNVEDGSVQLADHYQQNTPIGDGPVLLPDNHYLSTQSVLSKDPNEKRDHMVLLEFVTAAGITHGMDELYK

SEQ ID NO: 864 - DNA, 1014 bp, Artificial Sequence
  CD24_sfGFP
atgggcagagcaatggtggccaggctcgggctggggctgctgctgctggcactgctcctacccacgcagatttattccagtgaaacaacaactggaacttcaagtaactcctcccagagtacttccaactctgggttggccccaaatccaactaatgccaccaccaaggcggctggtggtgccctgcagtcaacagccagtctcttcgtggtctcactctctcttctgcatctctactctgagggcaggggatctctccttacttgtggcgacgtggaggagaaccccggccccatgcgtaaaggcgaagagctgttcactggtgtcgtccctattctggtggaactggatggtgatgtcaacggtcataagttttccgtgcgtggcgagggtgaaggtgacgcaactaatggtaaactgacgctgaagttcatctgtactactggtaaactgccggtaccttggccgactctggtaacgacgctgacttatggtgttcagtgctttgctcgttatccggaccatatgaagcagcatgacttcttcaagtccgccatgccggaaggctatgtgcaggaacgcacgatttcctttaaggatgacggcacgtacaaaacgcgtgcggaagtgaaatttgaaggcgataccctggtaaaccgcattgagctgaaaggcattgactttaaagaagacggcaatatcctgggccataagctggaatacaattttaacagccacaatgtttacatcaccgccgataaacaaaaaaatggcattaaagcgaattttaaaattcgccacaacgtggaggatggcagcgtgcagctggctgatcactaccagcaaaacactccaatcggtgatggtcctgttctgctgccagacaatcactatctgagcacgcaaagcgttctgtctaaagatccgaacgagaaacgcgatcatatggttctgctggagttcgtaaccgcagcgggcatcacgcatggtatggatgaactgtacaaatgataa

SEQ ID NO: 865 - protein, 80 aa, Artificial Sequence
  CD24_aa_NO_GFP
MGRAMVARLGLGLLLLALLLPTQIYSSETTTGTSSNSSQSTSNSGLAPNPTNATTKAAGGALQSTASLFVVSLSLLHLYS

SEQ ID NO: 866 - DNA, 240 bp, Artificial Sequence
  CD24_NT_NO_GFP
atgggcagagcaatggtggccaggctcgggctggggctgctgctgctggcactgctcctacccacgcagatttattccagtgaaacaacaactggaacttcaagtaactcctcccagagtacttccaactctgggttggccccaaatccaactaatgccaccaccaaggcggctggtggtgccctgcagtcaacagccagtctcttcgtggtctcactctctcttctgcatctctactct

SEQ ID NO: 867 - protein, 648 aa, Artificial Sequence
  HCV_E2_sfGFP_aa
MALPVTALLLPLALLLHAARPQTHTVGGSTAHNARTLTGMFSLGARQKIQLINTNGSWHINRTALNCNDSLHTGFLASLFYTHSFNSSGCPERMSACRSIEAFRVGWGALQYEDNVTNPEDMRPYCWHYPPRQCGVVSASSVCGPVYCFTPSPVVVGTTDRLGAPTYTWGENETDVFLLNSTRPPQGSWFGCTWMNSTGYTKTCGAPPCRIRADFNASMDLLCPTDCFRKHPDTTYIKCGSGPWLTPRCLIDYPYRLWHYPCTVNYTIFKIRMYVGGVEHRLTAACNFTRGDRCNLEDRDRSQLSPLLHSTTEWAILPCTYSDLPALSTGLLHLHQNIVDVQFMYGLSPALTKYIVRWEWVVLLFLLLADARVCACLWMLILLGQAEAGGGGSGGGGSGGGGSGGGGSGSMRKGEELFTGVVPILVELDGDVNGHKFSVRGEGEGDATNGKLTLKFICTTGKLPVPWPTLVTTLTYGVQCFARYPDHMKQHDFFKSAMPEGYVQERTISFKDDGTYKTRAEVKFEGDTLVNRIELKGIDFKEDGNILGHKLEYNFNSHNVYITADKQKNGIKANFKIRHNVEDGSVQLADHYQQNTPIGDGPVLLPDNHYLSTQSVLSKDPNEKRDHMVLLEFVTAAGITHGMDELYK

SEQ ID NO: 868 - DNA, 1950 bp, Artificial Sequence
  HCV_E2_sfGFP
atggcactccccgtaactgctctgctgctgccgttggcattgctcctgcacgccgcacgcccgcaaacccataccgttgggggttctaccgcgcataacgccaggaccctcaccggcatgttctcccttggtgccaggcagaaaatccagctcatcaacaccaatggcagttggcacatcaaccgcaccgccctgaactgcaatgactctttgcacaccggcttcctcgcgtcactgttctacacccacagcttcaactcgtcaggatgtcccgaacgcatgtccgcctgccgcagtatcgaggcctttcgggtgggatggggcgccttacaatatgaggacaatgtcaccaatccagaggatatgagaccgtattgctggcactacccaccaagacagtgtggtgtagtctccgcgagctctgtgtgtggcccagtgtactgtttcacccccagcccagtagtagtgggtacgaccgatagacttggagcgcccacttacacgtggggggagaatgagacagatgtcttcctattgaacagcactcgaccaccgcaggggtcatggttcggctgcacgtggatgaactccactggctacaccaagacttgcggcgcaccaccctgccgcattagagctgacttcaatgccagcatggacttgttgtgccccacggactgttttaggaagcatcctgataccacctacatcaaatgtggctctgggccctggctcacgccaaggtgcctgatcgactacccctacaggctctggcattacccctgcacagttaactataccatcttcaaaataaggatgtatgtggggggggtcgagcacaggctcacggctgcgtgcaatttcactcgtggggatcgttgcaacttggaggacagagacagaagtcaactgtctcctttgctgcactccaccacggagtgggccattttaccttgcacttactcggacctgcccgccttgtcgactggtcttctccacctccaccaaaacatcgtggacgtgcaattcatgtatggcctatcacctgctctcacaaaatacatcgtccgatgggagtgggtagtactcttattcctgctcttagcggacgccagggtttgcgcctgcttatggatgctcatcttgttgggccaggccgaagcaggtggtggcggttctggtggtggcggtagtggcggcggaggaagcggtggtggcggttccggatctatgcgtaaaggcgaagagctgttcactggtgtcgtccctattctggtggaactggatggtgatgtcaacggtcataagttttccgtgcgtggcgagggtgaaggtgacgcaactaatggtaaactgacgctgaagttcatctgtactactggtaaactgccggtaccttggccgactctggtaacgacgctgacttatggtgttcagtgctttgctcgttatccggaccatatgaagcagcatgacttcttcaagtccgccatgccggaaggctatgtgcaggaacgcacgatttcctttaaggatgacggcacgtacaaaacgcgtgcggaagtgaaatttgaaggcgataccctggtaaaccgcattgagctgaaaggcattgactttaaagaagacggcaatatcctgggccataagctggaatacaattttaacagccacaatgtttacatcaccgccgataaacaaaaaaatggcattaaagcgaattttaaaattcgccacaacgtggaggatggcagcgtgcagctggctgatcactaccagcaaaacactccaatcggtgatggtcctgttctgctgccagacaatcactatctgagcacgcaaagcgttctgtctaaagatccgaacgagaaacgcgatcatatggttctgctggagttcgtaaccgcagcgggcatcacgcatggtatggatgaactgtacaaatgataa

SEQ ID NO: 869 - protein, 388 aa, Artificial Sequence
  HCV_E2_aa_NO_GFP
MALPVTALLLPLALLLHAARPQTHTVGGSTAHNARTLTGMFSLGARQKIQLINTNGSWHINRTALNCNDSLHTGFLASLFYTHSFNSSGCPERMSACRSIEAFRVGWGALQYEDNVTNPEDMRPYCWHYPPRQCGVVSASSVCGPVYCFTPSPVVVGTTDRLGAPTYTWGENETDVFLLNSTRPPQGSWFGCTWMNSTGYTKTCGAPPCRIRADFNASMDLLCPTDCFRKHPDTTYIKCGSGPWLTPRCLIDYPYRLWHYPCTVNYTIFKIRMYVGGVEHRLTAACNFTRGDRCNLEDRDRSQLSPLLHSTTEWAILPCTYSDLPALSTGLLHLHQNIVDVQFMYGLSPALTKYIVRWEWVVLLFLLLADARVCACLWMLILLGQAEA

SEQ ID NO: 870 - DNA, 1164 bp, Artificial Sequence
  HCV_E2_NT_NO_GFP
atggcactccccgtaactgctctgctgctgccgttggcattgctcctgcacgccgcacgcccgcaaacccataccgttgggggttctaccgcgcataacgccaggaccctcaccggcatgttctcccttggtgccaggcagaaaatccagctcatcaacaccaatggcagttggcacatcaaccgcaccgccctgaactgcaatgactctttgcacaccggcttcctcgcgtcactgttctacacccacagcttcaactcgtcaggatgtcccgaacgcatgtccgcctgccgcagtatcgaggcctttcgggtgggatggggcgccttacaatatgaggacaatgtcaccaatccagaggatatgagaccgtattgctggcactacccaccaagacagtgtggtgtagtctccgcgagctctgtgtgtggcccagtgtactgtttcacccccagcccagtagtagtgggtacgaccgatagacttggagcgcccacttacacgtggggggagaatgagacagatgtcttcctattgaacagcactcgaccaccgcaggggtcatggttcggctgcacgtggatgaactccactggctacaccaagacttgcggcgcaccaccctgccgcattagagctgacttcaatgccagcatggacttgttgtgccccacggactgttttaggaagcatcctgataccacctacatcaaatgtggctctgggccctggctcacgccaaggtgcctgatcgactacccctacaggctctggcattacccctgcacagttaactataccatcttcaaaataaggatgtatgtggggggggtcgagcacaggctcacggctgcgtgcaatttcactcgtggggatcgttgcaacttggaggacagagacagaagtcaactgtctcctttgctgcactccaccacggagtgggccattttaccttgcacttactcggacctgcccgccttgtcgactggtcttctccacctccaccaaaacatcgtggacgtgcaattcatgtatggcctatcacctgctctcacaaaatacatcgtccgatgggagtgggtagtactcttattcctgctcttagcggacgccagggtttgcgcctgcttatggatgctcatcttgttgggccaggccgaagca

SEQ ID NO: 871 - protein, 591 aa, Artificial Sequence
  anti-SIRPa agonist_vLH_sfGFP_aa
MALPVTALLLPLALLLHAARPQPVLTQSPSVSVSPGQTASITCSGDKLGDTYACWYQQKPGQSPVLVIYQDTKRPSGIPERFSGSNSGNTATLTISGTQAMDEADYYCQAWDSSTVVFGGGTKLTVLGGGGSGGGGSGGGGSQVQLVESEGGLVQPGGSLRLSCAASGFTFSSYEMNWVRQAPGKGLEWVSYISSSGSTIYYADSVKGRFTISRDNAKNSLYLQMNSLRAEDTAVYYCAREAKGYYYGMDVWGQGTTVTVSSTTTPAPRPPTPAPTIASQPLSLRPEACRPAAGGAVHTRGLDFACDIYIWAPLAGTCGVLLLSLVITLYCGGGGSGGGGSGGGGSGGGGSGSMRKGEELFTGVVPILVELDGDVNGHKFSVRGEGEGDATNGKLTLKFICTTGKLPVPWPTLVTTLTYGVQCFARYPDHMKQHDFFKSAMPEGYVQERTISFKDDGTYKTRAEVKFEGDTLVNRIELKGIDFKEDGNILGHKLEYNFNSHNVYITADKQKNGIKANFKIRHNVEDGSVQLADHYQQNTPIGDGPVLLPDNHYLSTQSVLSKDPNEKRDHMVLLEFVTAAGITHGMDELYK

SEQ ID NO: 872 - DNA, 1779 bp, Artificial Sequence
  anti-SIRPa agonist_vLH_sfGFP
atggcactccccgtaactgctctgctgctgccgttggcattgctcctgcacgccgcacgcccgcagcctgtgctgactcagtcaccctcagtgtccgtgtccccaggacagacagccagcatcacctgctctggagataaattgggggatacatatgcttgctggtatcagcagaagccaggccagtcccctgtgctggtcatctatcaagataccaagcggccctcagggatccctgagcgattctctggctccaactctgggaacacagccactctgaccatcagcgggacccaggctatggatgaggctgactattactgtcaggcgtgggacagcagcactgtggtattcggcggagggaccaagctgaccgtcctaggtggtggcggatccggtggtggcggttctggtggtggcggctcccaggtgcagctggtggagtctgagggaggcttggtacagcctggagggtccctgagactctcctgtgcagcctctggattcaccttcagtagttatgaaatgaactgggtccgccaggctccagggaaggggctggagtgggtttcatacattagtagtagtggtagtaccatatactacgcagactctgtgaagggccgattcaccatctccagagacaacgccaagaactcactgtatctgcaaatgaacagcctgagagccgaggacacggctgtttattactgtgcgagagaggccaaggggtactactacggtatggacgtctggggccaagggaccacggtcaccgtctcgagtaccacgacgccagcgccgcgaccaccaacaccggcgcccaccatcgcgtcgcagcccctgtccctgcgcccagaggcgtgccggccagcggcggggggcgcagtgcacacgagggggctggacttcgcctgtgatatctacatctgggcgcccttggccgggacttgtggggtccttctcctgtcactggttatcaccctttactgcggtggtggcggttctggtggtggcggtagtggcggcggaggaagcggtggtggcggttccggatctatgcgtaaaggcgaagagctgttcactggtgtcgtccctattctggtggaactggatggtgatgtcaacggtcataagttttccgtgcgtggcgagggtgaaggtgacgcaactaatggtaaactgacgctgaagttcatctgtactactggtaaactgccggtaccttggccgactctggtaacgacgctgacttatggtgttcagtgctttgctcgttatccggaccatatgaagcagcatgacttcttcaagtccgccatgccggaaggctatgtgcaggaacgcacgatttcctttaaggatgacggcacgtacaaaacgcgtgcggaagtgaaatttgaaggcgataccctggtaaaccgcattgagctgaaaggcattgactttaaagaagacggcaatatcctgggccataagctggaatacaattttaacagccacaatgtttacatcaccgccgataaacaaaaaaatggcattaaagcgaattttaaaattcgccacaacgtggaggatggcagcgtgcagctggctgatcactaccagcaaaacactccaatcggtgatggtcctgttctgctgccagacaatcactatctgagcacgcaaagcgttctgtctaaagatccgaacgagaaacgcgatcatatggttctgctggagttcgtaaccgcagcgggcatcacgcatggtatggatgaactgtacaaatgataa

SEQ ID NO: 873 - protein, 331 aa, Artificial Sequence
  anti-SIRPa agonist_vLH_aa_NO_GFP
MALPVTALLLPLALLLHAARPQPVLTQSPSVSVSPGQTASITCSGDKLGDTYACWYQQKPGQSPVLVIYQDTKRPSGIPERFSGSNSGNTATLTISGTQAMDEADYYCQAWDSSTVVFGGGTKLTVLGGGGSGGGGSGGGGSQVQLVESEGGLVQPGGSLRLSCAASGFTFSSYEMNWVRQAPGKGLEWVSYISSSGSTIYYADSVKGRFTISRDNAKNSLYLQMNSLRAEDTAVYYCAREAKGYYYGMDVWGQGTTVTVSSTTTPAPRPPTPAPTIASQPLSLRPEACRPAAGGAVHTRGLDFACDIYIWAPLAGTCGVLLLSLVITLYC

SEQ ID NO: 874 - DNA, 993 bp, Artificial Sequence
  anti-SIRPa agonist_vLH_NT_NO_GFP
atggcactccccgtaactgctctgctgctgccgttggcattgctcctgcacgccgcacgcccgcagcctgtgctgactcagtcaccctcagtgtccgtgtccccaggacagacagccagcatcacctgctctggagataaattgggggatacatatgcttgctggtatcagcagaagccaggccagtcccctgtgctggtcatctatcaagataccaagcggccctcagggatccctgagcgattctctggctccaactctgggaacacagccactctgaccatcagcgggacccaggctatggatgaggctgactattactgtcaggcgtgggacagcagcactgtggtattcggcggagggaccaagctgaccgtcctaggtggtggcggatccggtggtggcggttctggtggtggcggctcccaggtgcagctggtggagtctgagggaggcttggtacagcctggagggtccctgagactctcctgtgcagcctctggattcaccttcagtagttatgaaatgaactgggtccgccaggctccagggaaggggctggagtgggtttcatacattagtagtagtggtagtaccatatactacgcagactctgtgaagggccgattcaccatctccagagacaacgccaagaactcactgtatctgcaaatgaacagcctgagagccgaggacacggctgtttattactgtgcgagagaggccaaggggtactactacggtatggacgtctggggccaagggaccacggtcaccgtctcgagtaccacgacgccagcgccgcgaccaccaacaccggcgcccaccatcgcgtcgcagcccctgtccctgcgcccagaggcgtgccggccagcggcggggggcgcagtgcacacgagggggctggacttcgcctgtgatatctacatctgggcgcccttggccgggacttgtggggtccttctcctgtcactggttatcaccctttactgc

SEQ ID NO: 875 - protein, 699 aa, Artificial Sequence
  CEACAM1_sfGFP_aa
MALPVTALLLPLALLLHAARPQLTTESMPFNVAEGKEVLLLVHNLPQQLFGYSWYKGERVDGNRQIVGYAIGTQQATPGPANSGRETIYPNASLLIQNVTQNDTGFYTLQVIKSDLVNEEATGQFHVYPELPKPSISSNNSNPVEDKDAVAFTCEPETQDTTYLWWINNQSLPVSPRLQLSNGNRTLTLLSVTRNDTGPYECEIQNPVSANRSDPVTLNVTYGPDTPTISPSDTYYRPGANLSLSCYAASNPPAQYSWLINGTFQQSTQELFIPNITVNNSGSYTCHANNSVTGCNRTTVKTIIVTELSPVVAKPQIKASKTTVTGDKDSVNLTCSTNDTGISIRWFFKNQSLPSSERMKLSQGNTTLSINPVKREDAGTYWCEVFNPISKNQSDPIMLNVNYNALPQENGLSPGAIAGIVIGVVALVALIAVALACFLGGGGSGGGGSGGGGSGGGGSGSMRKGEELFTGVVPILVELDGDVNGHKFSVRGEGEGDATNGKLTLKFICTTGKLPVPWPTLVTTLTYGVQCFARYPDHMKQHDFFKSAMPEGYVQERTISFKDDGTYKTRAEVKFEGDTLVNRIELKGIDFKEDGNILGHKLEYNFNSHNVYITADKQKNGIKANFKIRHNVEDGSVQLADHYQQNTPIGDGPVLLPDNHYLSTQSVLSKDPNEKRDHMVLLEFVTAAGITHGMDELYK

SEQ ID NO: 876 - DNA, 2103 bp, Artificial Sequence
  CEACAM1_sfGFP
atggcactccccgtaactgctctgctgctgccgttggcattgctcctgcacgccgcacgcccgcagctcactactgaatccatgccattcaatgttgcagaggggaaggaggttcttctccttgtccacaatctgccccagcaactttttggctacagctggtacaaaggggaaagagtggatggcaaccgtcaaattgtaggatatgcaataggaactcaacaagctaccccagggcccgcaaacagcggtcgagagacaatataccccaatgcatccctgctgatccagaacgtcacccagaatgacacaggattctacaccctacaagtcataaagtcagatcttgtgaatgaagaagcaactggacagttccatgtatacccggagctgcccaagccctccatctccagcaacaactccaaccctgtggaggacaaggatgctgtggccttcacctgtgaacctgagactcaggacacaacctacctgtggtggataaacaatcagagcctcccggtcagtcccaggctgcagctgtccaatggcaacaggaccctcactctactcagtgtcacaaggaatgacacaggaccctatgagtgtgaaatacagaacccagtgagtgcgaaccgcagtgacccagtcaccttgaatgtcacctatggcccggacacccccaccatttccccttcagacacctattaccgtccaggggcaaacctcagcctctcctgctatgcagcctctaacccacctgcacagtactcctggcttatcaatggaacattccagcaaagcacacaagagctctttatccctaacatcactgtgaataatagtggatcctatacctgccacgccaataactcagtcactggctgcaacaggaccacagtcaagacgatcatagtcactgagctaagtccagtagtagcaaagccccaaatcaaagccagcaagaccacagtcacaggagataaggactctgtgaacctgacctgctccacaaatgacactggaatctccatccgttggttcttcaaaaaccagagtctcccgtcctcggagaggatgaagctgtcccagggcaacaccaccctcagcataaaccctgtcaagagggaggatgctgggacgtattggtgtgaggtcttcaacccaatcagtaagaaccaaagcgaccccatcatgctgaacgtaaactataatgctctaccacaagaaaatggcctctcacctggggccattgctggcattgtgattggagtagtggccctggttgctctgatagcagtagccctggcatgttttctgggtggtggcggttctggtggtggcggtagtggcggcggaggaagcggtggtggcggttccggatctatgcgtaaaggcgaagagctgttcactggtgtcgtccctattctggtggaactggatggtgatgtcaacggtcataagttttccgtgcgtggcgagggtgaaggtgacgcaactaatggtaaactgacgctgaagttcatctgtactactggtaaactgccggtaccttggccgactctggtaacgacgctgacttatggtgttcagtgctttgctcgttatccggaccatatgaagcagcatgacttcttcaagtccgccatgccggaaggctatgtgcaggaacgcacgatttcctttaaggatgacggcacgtacaaaacgcgtgcggaagtgaaatttgaaggcgataccctggtaaaccgcattgagctgaaaggcattgactttaaagaagacggcaatatcctgggccataagctggaatacaattttaacagccacaatgtttacatcaccgccgataaacaaaaaaatggcattaaagcgaattttaaaattcgccacaacgtggaggatggcagcgtgcagctggctgatcactaccagcaaaacactccaatcggtgatggtcctgttctgctgccagacaatcactatctgagcacgcaaagcgttctgtctaaagatccgaacgagaaacgcgatcatatggttctgctggagttcgtaaccgcagcgggcatcacgcatggtatggatgaactgtacaaatgataa

SEQ ID NO: 877 - protein, 439 aa, Artificial Sequence
  CEACAM1_aa_NO_GFP
MALPVTALLLPLALLLHAARPQLTTESMPFNVAEGKEVLLLVHNLPQQLFGYSWYKGERVDGNRQIVGYAIGTQQATPGPANSGRETIYPNASLLIQNVTQNDTGFYTLQVIKSDLVNEEATGQFHVYPELPKPSISSNNSNPVEDKDAVAFTCEPETQDTTYLWWINNQSLPVSPRLQLSNGNRTLTLLSVTRNDTGPYECEIQNPVSANRSDPVTLNVTYGPDTPTISPSDTYYRPGANLSLSCYAASNPPAQYSWLINGTFQQSTQELFIPNITVNNSGSYTCHANNSVTGCNRTTVKTIIVTELSPVVAKPQIKASKTTVTGDKDSVNLTCSTNDTGISIRWFFKNQSLPSSERMKLSQGNTTLSINPVKREDAGTYWCEVFNPISKNQSDPIMLNVNYNALPQENGLSPGAIAGIVIGVVALVALIAVALACFL

SEQ ID NO: 878 - DNA, 1317 bp, Artificial Sequence
  CEACAM1_NT_NO_GFP
atggcactccccgtaactgctctgctgctgccgttggcattgctcctgcacgccgcacgcccgcagctcactactgaatccatgccattcaatgttgcagaggggaaggaggttcttctccttgtccacaatctgccccagcaactttttggctacagctggtacaaaggggaaagagtggatggcaaccgtcaaattgtaggatatgcaataggaactcaacaagctaccccagggcccgcaaacagcggtcgagagacaatataccccaatgcatccctgctgatccagaacgtcacccagaatgacacaggattctacaccctacaagtcataaagtcagatcttgtgaatgaagaagcaactggacagttccatgtatacccggagctgcccaagccctccatctccagcaacaactccaaccctgtggaggacaaggatgctgtggccttcacctgtgaacctgagactcaggacacaacctacctgtggtggataaacaatcagagcctcccggtcagtcccaggctgcagctgtccaatggcaacaggaccctcactctactcagtgtcacaaggaatgacacaggaccctatgagtgtgaaatacagaacccagtgagtgcgaaccgcagtgacccagtcaccttgaatgtcacctatggcccggacacccccaccatttccccttcagacacctattaccgtccaggggcaaacctcagcctctcctgctatgcagcctctaacccacctgcacagtactcctggcttatcaatggaacattccagcaaagcacacaagagctctttatccctaacatcactgtgaataatagtggatcctatacctgccacgccaataactcagtcactggctgcaacaggaccacagtcaagacgatcatagtcactgagctaagtccagtagtagcaaagccccaaatcaaagccagcaagaccacagtcacaggagataaggactctgtgaacctgacctgctccacaaatgacactggaatctccatccgttggttcttcaaaaaccagagtctcccgtcctcggagaggatgaagctgtcccagggcaacaccaccctcagcataaaccctgtcaagagggaggatgctgggacgtattggtgtgaggtcttcaacccaatcagtaagaaccaaagcgaccccatcatgctgaacgtaaactataatgctctaccacaagaaaatggcctctcacctggggccattgctggcattgtgattggagtagtggccctggttgctctgatagcagtagccctggcatgttttctg

SEQ ID NO: 879 - protein, 628 aa, Artificial Sequence
  CD155tm_3M_sfGFP_aa
MALPVTALLLPLALLLHAARPWPPPGTGDVVVQAPTQVPGFLGDSVTLPCYLQVPNMEVTHVSRLTWARHGESGAMAVFHQTQGPAYSESKRLEFVAARLGAELRNASLRMFGLRVEDEGNYTCLFVTFPQGSRSVDIWLRVLAKPQNTAEVQKVQLTGEPVPMARCVSTGGRPPAQITWHSDLGGMPNTSQVPGFLSGTVTVTSLWILVPSSQVDGKNVTCKVEHESFEKPQLLTVNLTVYYPPEVSISGYDNNWYLGQNEATLTCDARSNPEPTGYNWSTTMGPLPPFAVAQGAQLLIRPVDKPINTTLICNVTNALGARQAELTVQVKEGPPSEHSGISRNAIIFLVLGILVFLILLGIGIYFYWGGGGSGGGGSGGGGSGGGGSGSMRKGEELFTGVVPILVELDGDVNGHKFSVRGEGEGDATNGKLTLKFICTTGKLPVPWPTLVTTLTYGVQCFARYPDHMKQHDFFKSAMPEGYVQERTISFKDDGTYKTRAEVKFEGDTLVNRIELKGIDFKEDGNILGHKLEYNFNSHNVYITADKQKNGIKANFKIRHNVEDGSVQLADHYQQNTPIGDGPVLLPDNHYLSTQSVLSKDPNEKRDHMVLLEFVTAAGITHGMDELYK

SEQ ID NO: 880 - DNA, 1890 bp, Artificial Sequence
  CD155tm_3M_sfGFP
atggcactccccgtaactgctctgctgctgccgttggcattgctcctgcacgccgcacgcccgtggccacccccaggaaccggggacgtcgtcgtgcaggcgcccacccaggtgcccggcttcttgggcgactccgtgacgctgccctgctacctacaggtgcccaacatggaggtgacgcatgtgtcacggctgacttgggcgcggcatggtgaatctggcgccatggccgtcttccaccaaacgcagggccccgcctattcggagtccaaacggctggaattcgtggcagccagactgggcgcggagctgcggaatgcctcgctgaggatgttcgggttgcgcgtagaggatgaaggcaactacacctgcctgttcgtcacgttcccgcagggcagcaggagcgtggatatctggctccgagtgcttgccaagccccagaacacagctgaggttcagaaggtccagctcactggagagccagtgcccatggcccgctgcgtctccacagggggtcgcccgccagcccaaatcacctggcactcagacctgggcgggatgcccaatacgagccaggtgccagggttcctgtctggcacagtcactgtcaccagcctctggatattggtgccctcaagccaggtggacggcaagaatgtgacctgcaaggtggagcacgagagctttgagaagcctcagctgctgactgtgaacctcaccgtgtactaccccccagaggtatccatctctggctatgataacaactggtaccttggccagaatgaggccaccctgacctgcgatgctcgcagcaacccagagcccacaggctataattggagcacgaccatgggtcccctgccaccctttgctgtggcccagggcgcccagctcctgatccgtcctgtggacaaaccaatcaacacaactttaatctgcaacgtcaccaatgccctaggagctcgccaggcagaactgaccgtccaggtcaaagagggacctcccagtgagcactcaggcatctcccgtaacgccatcatcttcctggttctgggaatcctggtttttctgatcctgctggggatcgggatttatttctattggggtggtggcggttctggtggtggcggtagtggcggcggaggaagcggtggtggcggttccggatctatgcgtaaaggcgaagagctgttcactggtgtcgtccctattctggtggaactggatggtgatgtcaacggtcataagttttccgtgcgtggcgagggtgaaggtgacgcaactaatggtaaactgacgctgaagttcatctgtactactggtaaactgccggtaccttggccgactctggtaacgacgctgacttatggtgttcagtgctttgctcgttatccggaccatatgaagcagcatgacttcttcaagtccgccatgccggaaggctatgtgcaggaacgcacgatttcctttaaggatgacggcacgtacaaaacgcgtgcggaagtgaaatttgaaggcgataccctggtaaaccgcattgagctgaaaggcattgactttaaagaagacggcaatatcctgggccataagctggaatacaattttaacagccacaatgtttacatcaccgccgataaacaaaaaaatggcattaaagcgaattttaaaattcgccacaacgtggaggatggcagcgtgcagctggctgatcactaccagcaaaacactccaatcggtgatggtcctgttctgctgccagacaatcactatctgagcacgcaaagcgttctgtctaaagatccgaacgagaaacgcgatcatatggttctgctggagttcgtaaccgcagcgggcatcacgcatggtatggatgaactgtacaaatgataa

SEQ ID NO: 881 - protein, 368 aa, Artificial Sequence
  CD155tm_3M_aa_NO_GFP
MALPVTALLLPLALLLHAARPWPPPGTGDVVVQAPTQVPGFLGDSVTLPCYLQVPNMEVTHVSRLTWARHGESGAMAVFHQTQGPAYSESKRLEFVAARLGAELRNASLRMFGLRVEDEGNYTCLFVTFPQGSRSVDIWLRVLAKPQNTAEVQKVQLTGEPVPMARCVSTGGRPPAQITWHSDLGGMPNTSQVPGFLSGTVTVTSLWILVPSSQVDGKNVTCKVEHESFEKPQLLTVNLTVYYPPEVSISGYDNNWYLGQNEATLTCDARSNPEPTGYNWSTTMGPLPPFAVAQGAQLLIRPVDKPINTTLICNVTNALGARQAELTVQVKEGPPSEHSGISRNAIIFLVLGILVFLILLGIGIYFYW

SEQ ID NO: 882 - DNA, 1104 bp, Artificial Sequence
  CD155tm_3M_NT_NO_GFP
atggcactccccgtaactgctctgctgctgccgttggcattgctcctgcacgccgcacgcccgtggccacccccaggaaccggggacgtcgtcgtgcaggcgcccacccaggtgcccggcttcttgggcgactccgtgacgctgccctgctacctacaggtgcccaacatggaggtgacgcatgtgtcacggctgacttgggcgcggcatggtgaatctggcgccatggccgtcttccaccaaacgcagggccccgcctattcggagtccaaacggctggaattcgtggcagccagactgggcgcggagctgcggaatgcctcgctgaggatgttcgggttgcgcgtagaggatgaaggcaactacacctgcctgttcgtcacgttcccgcagggcagcaggagcgtggatatctggctccgagtgcttgccaagccccagaacacagctgaggttcagaaggtccagctcactggagagccagtgcccatggcccgctgcgtctccacagggggtcgcccgccagcccaaatcacctggcactcagacctgggcgggatgcccaatacgagccaggtgccagggttcctgtctggcacagtcactgtcaccagcctctggatattggtgccctcaagccaggtggacggcaagaatgtgacctgcaaggtggagcacgagagctttgagaagcctcagctgctgactgtgaacctcaccgtgtactaccccccagaggtatccatctctggctatgataacaactggtaccttggccagaatgaggccaccctgacctgcgatgctcgcagcaacccagagcccacaggctataattggagcacgaccatgggtcccctgccaccctttgctgtggcccagggcgcccagctcctgatccgtcctgtggacaaaccaatcaacacaactttaatctgcaacgtcaccaatgccctaggagctcgccaggcagaactgaccgtccaggtcaaagagggacctcccagtgagcactcaggcatctcccgtaacgccatcatcttcctggttctgggaatcctggtttttctgatcctgctggggatcgggatttatttctattgg

SEQ ID NO: 883 - protein, 874 aa, Artificial Sequence
  CD31tm_sfGFP_aa
MALPVTALLLPLALLLHAARPQENSFTINSVDMKSLPDWTVQNGKNLTLQCFADVSTTSHVKPQHQMLFYKDDVLFYNISSMKSTESYFIPEVRIYDSGTYKCTVIVNNKEKTTAEYQVLVEGVPSPRVTLDKKEAIQGGIVRVNCSVPEEKAPIHFTIEKLELNEKMVKLKREKNSRDQNFVILEFPVEEQDRVLSFRCQARIISGIHMQTSESTKSELVTVTESFSTPKFHISPTGMIMEGAQLHIKCTIQVTHLAQEFPEIIIQKDKAIVAHNRHGNKAVYSVMAMVEHSGNYTCKVESSRISKVSSIVVNITELFSKPELESSFTHLDQGERLNLSCSIPGAPPANFTIQKEDTIVSQTQDFTKIASKSDSGTYICTAGIDKVVKKSNTVQIVVCEMLSQPRISYDAQFEVIKGQTIEVRCESISGTLPISYQLLKTSKVLENSTKNSNDPAVFKDNPTEDVEYQCVADNCHSHAKMLSEVLRVKVIAPVDEVQISILSSKVVESGEDIVLQCAVNEGSGPITYKFYREKEGKPFYQMTSNATQAFWTKQKASKEQEGEYYCTAFNRANHASSVPRSKILTVRVILAPWKKGLIAVVIIGVIIALLIIAAGGGGSGGGGSGGGGSGGGGSGSMRKGEELFTGVVPILVELDGDVNGHKFSVRGEGEGDATNGKLTLKFICTTGKLPVPWPTLVTTLTYGVQCFARYPDHMKQHDFFKSAMPEGYVQERTISFKDDGTYKTRAEVKFEGDTLVNRIELKGIDFKEDGNILGHKLEYNFNSHNVYITADKQKNGIKANFKIRHNVEDGSVQLADHYQQNTPIGDGPVLLPDNHYLSTQSVLSKDPNEKRDHMVLLEFVTAAGITHGMDELYK

SEQ ID NO: 884 - DNA, 2628 bp, Artificial Sequence
  CD31tm_sfGFP
atggcactccccgtaactgctctgctgctgccgttggcattgctcctgcacgccgcacgcccgcaagaaaactctttcacaatcaacagtgttgacatgaagagcctgccggactggacggtgcaaaatgggaagaacctgaccctgcagtgcttcgcggatgtcagcaccacctctcacgtcaagcctcagcaccagatgctgttctataaggatgacgtgctgttttacaacatctcctccatgaagagcacagagagttattttattcctgaagtccggatctatgactcagggacatataaatgtactgtgattgtgaacaacaaagagaaaaccactgcagagtaccaggtgttggtggaaggagtgcccagtcccagggtgacactggacaagaaagaggccatccaaggtgggatcgtgagggtcaactgttctgtcccagaggaaaaggccccaatacacttcacaattgaaaaacttgaactaaatgaaaaaatggtcaagctgaaaagagagaagaattctcgagaccagaattttgtgatactggaattccccgttgaggaacaggaccgcgttttatccttccgatgtcaagctaggatcatttctgggatccatatgcagacctcagaatctaccaagagtgaactggtcaccgtgacggaatccttctctacacccaagttccacatcagccccaccggaatgatcatggaaggagctcagctccacattaagtgcaccattcaagtgactcacctggcccaggagtttccagaaatcataattcagaaggacaaggcgattgtggcccacaacagacatggcaacaaggctgtgtactcagtcatggccatggtggagcacagtggcaactacacgtgcaaagtggagtccagccgcatatccaaggtcagcagcatcgtggtcaacataacagaactattttccaagcccgaactggaatcttccttcacacatctggaccaaggtgaaagactgaacctgtcctgctccatcccaggagcacctccagccaacttcaccatccagaaggaagatacgattgtgtcacagactcaagatttcaccaagatagcctcaaagtcggacagtgggacgtatatctgcactgcaggtattgacaaagtggtcaagaaaagcaacacagtccagatagtcgtatgtgaaatgctctcccagcccaggatttcttatgatgcccagtttgaggtcataaaaggacagaccatcgaagtccgttgcgaatcgatcagtggaactttgcctatttcttaccaacttttaaaaacaagtaaagttttggagaatagtaccaagaactcaaatgatcctgcggtattcaaagacaaccccactgaagacgtcgaataccagtgtgttgcagataattgccattcccatgccaaaatgttaagtgaggttctgagggtgaaggtgatagccccggtggatgaggtccagatttctatcctgtcaagtaaggtggtggagtctggagaggacattgtgctgcaatgtgctgtgaatgaaggatctggtcccatcacctataagttttacagagaaaaagagggcaaacccttctatcaaatgacctcaaatgccacccaggcattttggaccaagcagaaggctagcaaggaacaggagggagagtattactgcacagccttcaacagagccaaccacgcctccagtgtccccagaagcaaaatactgacagtcagagtcattcttgccccatggaagaaaggacttattgcagtggttatcatcggagtgatcattgctctcttgatcattgcggccggtggtggcggttctggtggtggcggtagtggcggcggaggaagcggtggtggcggttccggatctatgcgtaaaggcgaagagctgttcactggtgtcgtccctattctggtggaactggatggtgatgtcaacggtcataagttttccgtgcgtggcgagggtgaaggtgacgcaactaatggtaaactgacgctgaagttcatctgtactactggtaaactgccggtaccttggccgactctggtaacgacgctgacttatggtgttcagtgctttgctcgttatccggaccatatgaagcagcatgacttcttcaagtccgccatgccggaaggctatgtgcaggaacgcacgatttcctttaaggatgacggcacgtacaaaacgcgtgcggaagtgaaatttgaaggcgataccctggtaaaccgcattgagctgaaaggcattgactttaaagaagacggcaatatcctgggccataagctggaatacaattttaacagccacaatgtttacatcaccgccgataaacaaaaaaatggcattaaagcgaattttaaaattcgccacaacgtggaggatggcagcgtgcagctggctgatcactaccagcaaaacactccaatcggtgatggtcctgttctgctgccagacaatcactatctgagcacgcaaagcgttctgtctaaagatccgaacgagaaacgcgatcatatggttctgctggagttcgtaaccgcagcgggcatcacgcatggtatggatgaactgtacaaatgataa

SEQ ID NO: 885 - protein, 614 aa, Artificial Sequence
  CD31tm_aa_NO_GFP
MALPVTALLLPLALLLHAARPQENSFTINSVDMKSLPDWTVQNGKNLTLQCFADVSTTSHVKPQHQMLFYKDDVLFYNISSMKSTESYFIPEVRIYDSGTYKCTVIVNNKEKTTAEYQVLVEGVPSPRVTLDKKEAIQGGIVRVNCSVPEEKAPIHFTIEKLELNEKMVKLKREKNSRDQNFVILEFPVEEQDRVLSFRCQARIISGIHMQTSESTKSELVTVTESFSTPKFHISPTGMIMEGAQLHIKCTIQVTHLAQEFPEIIIQKDKAIVAHNRHGNKAVYSVMAMVEHSGNYTCKVESSRISKVSSIVVNITELFSKPELESSFTHLDQGERLNLSCSIPGAPPANFTIQKEDTIVSQTQDFTKIASKSDSGTYICTAGIDKVVKKSNTVQIVVCEMLSQPRISYDAQFEVIKGQTIEVRCESISGTLPISYQLLKTSKVLENSTKNSNDPAVFKDNPTEDVEYQCVADNCHSHAKMLSEVLRVKVIAPVDEVQISILSSKVVESGEDIVLQCAVNEGSGPITYKFYREKEGKPFYQMTSNATQAFWTKQKASKEQEGEYYCTAFNRANHASSVPRSKILTVRVILAPWKKGLIAVVIIGVIIALLIIAA

SEQ ID NO: 886 - DNA, 1842 bp, Artificial Sequence
  CD31tm_NT_NO_GFP
atggcactccccgtaactgctctgctgctgccgttggcattgctcctgcacgccgcacgcccgcaagaaaactctttcacaatcaacagtgttgacatgaagagcctgccggactggacggtgcaaaatgggaagaacctgaccctgcagtgcttcgcggatgtcagcaccacctctcacgtcaagcctcagcaccagatgctgttctataaggatgacgtgctgttttacaacatctcctccatgaagagcacagagagttattttattcctgaagtccggatctatgactcagggacatataaatgtactgtgattgtgaacaacaaagagaaaaccactgcagagtaccaggtgttggtggaaggagtgcccagtcccagggtgacactggacaagaaagaggccatccaaggtgggatcgtgagggtcaactgttctgtcccagaggaaaaggccccaatacacttcacaattgaaaaacttgaactaaatgaaaaaatggtcaagctgaaaagagagaagaattctcgagaccagaattttgtgatactggaattccccgttgaggaacaggaccgcgttttatccttccgatgtcaagctaggatcatttctgggatccatatgcagacctcagaatctaccaagagtgaactggtcaccgtgacggaatccttctctacacccaagttccacatcagccccaccggaatgatcatggaaggagctcagctccacattaagtgcaccattcaagtgactcacctggcccaggagtttccagaaatcataattcagaaggacaaggcgattgtggcccacaacagacatggcaacaaggctgtgtactcagtcatggccatggtggagcacagtggcaactacacgtgcaaagtggagtccagccgcatatccaaggtcagcagcatcgtggtcaacataacagaactattttccaagcccgaactggaatcttccttcacacatctggaccaaggtgaaagactgaacctgtcctgctccatcccaggagcacctccagccaacttcaccatccagaaggaagatacgattgtgtcacagactcaagatttcaccaagatagcctcaaagtcggacagtgggacgtatatctgcactgcaggtattgacaaagtggtcaagaaaagcaacacagtccagatagtcgtatgtgaaatgctctcccagcccaggatttcttatgatgcccagtttgaggtcataaaaggacagaccatcgaagtccgttgcgaatcgatcagtggaactttgcctatttcttaccaacttttaaaaacaagtaaagttttggagaatagtaccaagaactcaaatgatcctgcggtattcaaagacaaccccactgaagacgtcgaataccagtgtgttgcagataattgccattcccatgccaaaatgttaagtgaggttctgagggtgaaggtgatagccccggtggatgaggtccagatttctatcctgtcaagtaaggtggtggagtctggagaggacattgtgctgcaatgtgctgtgaatgaaggatctggtcccatcacctataagttttacagagaaaaagagggcaaacccttctatcaaatgacctcaaatgccacccaggcattttggaccaagcagaaggctagcaaggaacaggagggagagtattactgcacagccttcaacagagccaaccacgcctccagtgtccccagaagcaaaatactgacagtcagagtcattcttgccccatggaagaaaggacttattgcagtggttatcatcggagtgatcattgctctcttgatcattgcggcc

SEQ ID NO: 887 - protein, 627 aa, Artificial Sequence
  CD111tm_sfGFP_aa
MALPVTALLLPLALLLHAARPQVVQVNDSMYGFIGTDVVLHCSFANPLPSVKITQVTWQKSTNGSKQNVAIYNPSMGVSVLAPYRERVEFLRPSFTDGTIRLSRLELEDEGVYICEFATFPTGNRESQLNLTVMAKPTNWIEGTQAVLRAKKGQDDKVLVATCTSANGKPPSVVSWETRLKGEAEYQEIRNPNGTVTVISRYRLVPSREAHQQSLACIVNYHMDRFKESLTLNVQYEPEVTIEGFDGNWYLQRMDVKLTCKADANPPATEYHWTTLNGSLPKGVEAQNRTLFFKGPINYSLAGTYICEATNPIGTRSGQVEVNITEFPYTPSPPEHGRRAGPVPTAIIGGVAGSILLVLIVVGGIVVGGGGSGGGGSGGGGSGGGGSGSMRKGEELFTGVVPILVELDGDVNGHKFSVRGEGEGDATNGKLTLKFICTTGKLPVPWPTLVTTLTYGVQCFARYPDHMKQHDFFKSAMPEGYVQERTISFKDDGTYKTRAEVKFEGDTLVNRIELKGIDFKEDGNILGHKLEYNFNSHNVYITADKQKNGIKANFKIRHNVEDGSVQLADHYQQNTPIGDGPVLLPDNHYLSTQSVLSKDPNEKRDHMVLLEFVTAAGITHGMDELYK

SEQ ID NO: 888 - DNA, 1887 bp, Artificial Sequence
  CD111tm_sfGFP
atggcactccccgtaactgctctgctgctgccgttggcattgctcctgcacgccgcacgcccgcaggtggtccaggtgaacgactccatgtatggcttcatcggcacagacgtggttctgcactgcagctttgccaacccgcttcccagcgtgaagatcacccaggtcacatggcagaagtccaccaatggctccaagcagaacgtggccatctacaacccatccatgggcgtgtccgtgctggctccctaccgcgagcgtgtggaattcctgcggccctccttcaccgatggcactatccgcctctcccgcctggagctggaggatgagggtgtctacatctgcgagtttgctaccttccctacgggcaatcgagaaagccagctcaatctcacggtgatggccaaacccaccaattggatagagggtacccaggcagtgcttcgagccaagaaggggcaggatgacaaggtcctggtggccacctgcacctcagccaatgggaagcctcccagtgtggtatcctgggaaactcggttaaaaggtgaggcagagtaccaggagatccggaaccccaatggcacagtgacggtcatcagccgctaccgcctggtgcccagcagggaagcccaccagcagtccttggcctgcatcgtcaactaccacatggaccgcttcaaggaaagcctcactctcaacgtgcagtatgagcctgaggtaaccattgaggggtttgatggcaactggtacctgcagcggatggacgtgaagctcacctgcaaagctgatgctaaccccccagccactgagtaccactggaccacgctaaatggctctctccccaagggtgtggaggcccagaacagaaccctcttcttcaagggacccatcaactacagcctggcagggacctacatctgtgaggccaccaaccccatcggtacacgctcaggccaggtggaggtcaatatcacagaattcccctacaccccgtctcctcccgaacatgggcggcgcgccgggccggtgcccacggccatcattgggggcgtggcggggagcatcctgctggtgttgattgtggtcggcgggatcgtggtcggtggtggcggttctggtggtggcggtagtggcggcggaggaagcggtggtggcggttccggatctatgcgtaaaggcgaagagctgttcactggtgtcgtccctattctggtggaactggatggtgatgtcaacggtcataagttttccgtgcgtggcgagggtgaaggtgacgcaactaatggtaaactgacgctgaagttcatctgtactactggtaaactgccggtaccttggccgactctggtaacgacgctgacttatggtgttcagtgctttgctcgttatccggaccatatgaagcagcatgacttcttcaagtccgccatgccggaaggctatgtgcaggaacgcacgatttcctttaaggatgacggcacgtacaaaacgcgtgcggaagtgaaatttgaaggcgataccctggtaaaccgcattgagctgaaaggcattgactttaaagaagacggcaatatcctgggccataagctggaatacaattttaacagccacaatgtttacatcaccgccgataaacaaaaaaatggcattaaagcgaattttaaaattcgccacaacgtggaggatggcagcgtgcagctggctgatcactaccagcaaaacactccaatcggtgatggtcctgttctgctgccagacaatcactatctgagcacgcaaagcgttctgtctaaagatccgaacgagaaacgcgatcatatggttctgctggagttcgtaaccgcagcgggcatcacgcatggtatggatgaactgtacaaatgataa

SEQ ID NO: 889 - protein, 367 aa, Artificial Sequence
  CD111tm_aa_NO_GFP
MALPVTALLLPLALLLHAARPQVVQVNDSMYGFIGTDVVLHCSFANPLPSVKITQVTWQKSTNGSKQNVAIYNPSMGVSVLAPYRERVEFLRPSFTDGTIRLSRLELEDEGVYICEFATFPTGNRESQLNLTVMAKPTNWIEGTQAVLRAKKGQDDKVLVATCTSANGKPPSVVSWETRLKGEAEYQEIRNPNGTVTVISRYRLVPSREAHQQSLACIVNYHMDRFKESLTLNVQYEPEVTIEGFDGNWYLQRMDVKLTCKADANPPATEYHWTTLNGSLPKGVEAQNRTLFFKGPINYSLAGTYICEATNPIGTRSGQVEVNITEFPYTPSPPEHGRRAGPVPTAIIGGVAGSILLVLIVVGGIVV

SEQ ID NO: 890 - DNA, 1101 bp, Artificial Sequence
  CD111tm_NT_NO_GFP
atggcactccccgtaactgctctgctgctgccgttggcattgctcctgcacgccgcacgcccgcaggtggtccaggtgaacgactccatgtatggcttcatcggcacagacgtggttctgcactgcagctttgccaacccgcttcccagcgtgaagatcacccaggtcacatggcagaagtccaccaatggctccaagcagaacgtggccatctacaacccatccatgggcgtgtccgtgctggctccctaccgcgagcgtgtggaattcctgcggccctccttcaccgatggcactatccgcctctcccgcctggagctggaggatgagggtgtctacatctgcgagtttgctaccttccctacgggcaatcgagaaagccagctcaatctcacggtgatggccaaacccaccaattggatagagggtacccaggcagtgcttcgagccaagaaggggcaggatgacaaggtcctggtggccacctgcacctcagccaatgggaagcctcccagtgtggtatcctgggaaactcggttaaaaggtgaggcagagtaccaggagatccggaaccccaatggcacagtgacggtcatcagccgctaccgcctggtgcccagcagggaagcccaccagcagtccttggcctgcatcgtcaactaccacatggaccgcttcaaggaaagcctcactctcaacgtgcagtatgagcctgaggtaaccattgaggggtttgatggcaactggtacctgcagcggatggacgtgaagctcacctgcaaagctgatgctaaccccccagccactgagtaccactggaccacgctaaatggctctctccccaagggtgtggaggcccagaacagaaccctcttcttcaagggacccatcaactacagcctggcagggacctacatctgtgaggccaccaaccccatcggtacacgctcaggccaggtggaggtcaatatcacagaattcccctacaccccgtctcctcccgaacatgggcggcgcgccgggccggtgcccacggccatcattgggggcgtggcggggagcatcctgctggtgttgattgtggtcggcgggatcgtggtc

SEQ ID NO: 891 - protein, 510 aa, Artificial Sequence
  CD200tm_sfGFP_aa
MALPVTALLLPLALLLHAARPQVQVVTQDEREQLYTPASLKCSLQNAQEALIVTWQKKKAVSPENMVTFSENHGVVIQPAYKDKINITQLGLQNSTITFWNITLEDEGCYMCLFNTFGFGKISGTACLTVYVQPIVSLHYKFSEDHLNITCSATARPAPMVFWKVPRSGIENSTVTLSHPNGTTSVTSILHIKDPKNQVGKEVICQVLHLGTVTDFKQTVNKGYWFSVPLLLSIVSLVILLVLISILLYWGGGGSGGGGSGGGGSGGGGSGSMRKGEELFTGVVPILVELDGDVNGHKFSVRGEGEGDATNGKLTLKFICTTGKLPVPWPTLVTTLTYGVQCFARYPDHMKQHDFFKSAMPEGYVQERTISFKDDGTYKTRAEVKFEGDTLVNRIELKGIDFKEDGNILGHKLEYNFNSHNVYITADKQKNGIKANFKIRHNVEDGSVQLADHYQQNTPIGDGPVLLPDNHYLSTQSVLSKDPNEKRDHMVLLEFVTAAGITHGMDELYK

SEQ ID NO: 892 - DNA, 1536 bp, Artificial Sequence
  CD200tm_sfGFP
atggcactccccgtaactgctctgctgctgccgttggcattgctcctgcacgccgcacgcccgcaagtgcaagtggtgacccaggatgaaagagagcagctgtacacacctgcttccttaaaatgctctctgcaaaatgcccaggaagccctcattgtgacatggcagaaaaagaaagctgtaagcccagaaaacatggtcaccttcagcgagaaccatggggtggtgatccagcctgcctataaggacaagataaacattacccagctgggactccaaaactcaaccatcaccttctggaatatcaccctggaggatgaagggtgttacatgtgtctcttcaatacctttggttttgggaagatctcaggaacggcctgcctcaccgtctatgtacagcccatagtatcccttcactacaaattctctgaagaccacctaaatatcacttgctctgccactgcccgcccagcccccatggtcttctggaaggtccctcggtcagggattgaaaatagtacagtgactctgtctcacccaaatgggaccacgtctgttaccagcatcctccatatcaaagaccctaagaatcaggtggggaaggaggtgatctgccaggtgctgcacctggggactgtgaccgactttaagcaaaccgtcaacaaaggctattggttttcagttccgctattgctaagcattgtttccctggtaattcttctcgtcctaatctcaatcttactgtactggggtggtggcggttctggtggtggcggtagtggcggcggaggaagcggtggtggcggttccggatctatgcgtaaaggcgaagagctgttcactggtgtcgtccctattctggtggaactggatggtgatgtcaacggtcataagttttccgtgcgtggcgagggtgaaggtgacgcaactaatggtaaactgacgctgaagttcatctgtactactggtaaactgccggtaccttggccgactctggtaacgacgctgacttatggtgttcagtgctttgctcgttatccggaccatatgaagcagcatgacttcttcaagtccgccatgccggaaggctatgtgcaggaacgcacgatttcctttaaggatgacggcacgtacaaaacgcgtgcggaagtgaaatttgaaggcgataccctggtaaaccgcattgagctgaaaggcattgactttaaagaagacggcaatatcctgggccataagctggaatacaattttaacagccacaatgtttacatcaccgccgataaacaaaaaaatggcattaaagcgaattttaaaattcgccacaacgtggaggatggcagcgtgcagctggctgatcactaccagcaaaacactccaatcggtgatggtcctgttctgctgccagacaatcactatctgagcacgcaaagcgttctgtctaaagatccgaacgagaaacgcgatcatatggttctgctggagttcgtaaccgcagcgggcatcacgcatggtatggatgaactgtacaaatgataa

SEQ ID NO: 893 - protein, 250 aa, Artificial Sequence
  CD200tm_aa_NO_GFP
MALPVTALLLPLALLLHAARPQVQVVTQDEREQLYTPASLKCSLQNAQEALIVTWQKKKAVSPENMVTFSENHGVVIQPAYKDKINITQLGLQNSTITFWNITLEDEGCYMCLFNTFGFGKISGTACLTVYVQPIVSLHYKFSEDHLNITCSATARPAPMVFWKVPRSGIENSTVTLSHPNGTTSVTSILHIKDPKNQVGKEVICQVLHLGTVTDFKQTVNKGYWFSVPLLLSIVSLVILLVLISILLYW

SEQ ID NO: 894 - DNA, 750 bp, Artificial Sequence
  CD200tm_NO_GFP
atggcactccccgtaactgctctgctgctgccgttggcattgctcctgcacgccgcacgcccgcaagtgcaagtggtgacccaggatgaaagagagcagctgtacacacctgcttccttaaaatgctctctgcaaaatgcccaggaagccctcattgtgacatggcagaaaaagaaagctgtaagcccagaaaacatggtcaccttcagcgagaaccatggggtggtgatccagcctgcctataaggacaagataaacattacccagctgggactccaaaactcaaccatcaccttctggaatatcaccctggaggatgaagggtgttacatgtgtctcttcaatacctttggttttgggaagatctcaggaacggcctgcctcaccgtctatgtacagcccatagtatcccttcactacaaattctctgaagaccacctaaatatcacttgctctgccactgcccgcccagcccccatggtcttctggaaggtccctcggtcagggattgaaaatagtacagtgactctgtctcacccaaatgggaccacgtctgttaccagcatcctccatatcaaagaccctaagaatcaggtggggaaggaggtgatctgccaggtgctgcacctggggactgtgaccgactttaagcaaaccgtcaacaaaggctattggttttcagttccgctattgctaagcattgtttccctggtaattcttctcgtcctaatctcaatcttactgtactgg

SEQ ID NO: 895 - protein, 21 aa, Artificial Sequence
  CD8a signal peptide AA
MALPVTALLLPLALLLHAARP

SEQ ID NO: 896 - DNA, 63 bp, Artificial Sequence
  CD8a signal peptide NT
atggcactccccgtaactgctctgctgctgccgttggcattgctcctgcacgccgcacgcccg

SEQ ID NO: 897 - protein, 21 aa, Artificial Sequence
  Synthetic
MALPVTALLLPLALLLHAARP

SEQ ID NO: 898 - DNA, 63 bp, Artificial Sequence; identical to SEQ ID NO: 896
  Synthetic

SEQ ID NO: 899 - protein, 374 aa, Artificial Sequence; identical to SEQ ID NO: 174
  Synthetic

SEQ ID NO: 900 - protein, 481 aa, Artificial Sequence
  Synthetic
MALPVTALLLPLALLLHAARPDIQMTQSPSSLSASVGDRVTITCRASQDISKYLNWYQQKPGGTVKLLIYHTSRLHSGVPSRFSGSGSGTDFTLTISSLQPEDIATYYCQQGNTLPYTFGGGTKLEITGGGGSGGGGSGGGGSQVQLQESGPGLVKPSQTLSLTCTVSGVSLPDYGVSWIRQPPGKGLEWIGVIWGSETTYYNSALKSRLTISKDNSKNQVSLKLSSVTAADTAVYYCAKHYYYGGSYAMDYWGQGTSVTVSSTTTPAPRPPTPAPTIASQPLSLRPEACRPAAGGAVHTRGLDFACDIYIWAPLAGTCGVLLLSLVITLYCRRDQRLPPDAHKPPGGGSFRTPIQEEQADAHSTLAKIRVKFSRSADAPAYQQGQNQLYNELNLGRREEYDVLDKRRGRDPEMGGKPRRKNPQEGLYNELQKDKMAEAYSEIGMKGERRRGKGHDGLYQGLSTATKDTYDALHMQALPPR

SEQ ID NO: 901 - protein, 481 aa, Artificial Sequence
  Synthetic
MALPVTALLLPLALLLHAARPDIQMTQSPSSLSASVGDRVTITCRASQDISKYLNWYQQKPGGTVKLLIYHTSRLHSGVPSRFSGSGSGTDFTLTISSLQPEDIATYFCQQGNTLPYTFGGGTKLEITGGGGSGGGGSGGGGSQVQLQESGPGLVKPSQTLSLTCTVSGVSLPDYGVSWIRQPPGKGLEWIGVIWGSETTYYNSALKSRLTISKDNSKNQVSLKLSSVTAADTAVYYCAKHYYYGGSYAMDYWGQGTSVTVSSTTTPAPRPPTPAPTIASQPLSLRPEACRPAAGGAVHTRGLDFACDIYIWAPLAGTCGVLLLSLVITLYCRRDQRLPPDAHKPPGGGSFRTPIQEEQADAHSTLAKIRVKFSRSADAPAYQQGQNQLYNELNLGRREEYDVLDKRRGRDPEMGGKPRRKNPQEGLYNELQKDKMAEAYSEIGMKGERRRGKGHDGLYQGLSTATKDTYDALHMQALPPR

SEQ ID NO: 902 - protein, 481 aa, Artificial Sequence
  Synthetic
MALPVTALLLPLALLLHAARPDIQMTQSPSSLSASVGDRVTITCRASQDISKYLNWYQQKPDGTVKLLIYHTSRLHSGVPSRFSGSGSGTDYTLTISSLQPEDIATYFCQQGNTLPYTFGGGTKLEITGGGGSGGGGSGGGGSQVQLQESGPGLVKPSQTLSLTCTVSGVSLPDYGVSWIRQPPGKGLEWIGVIWGSETTYYNSALKSRLTISKDNSKNQVSLKLSSVTAADTAVYYCAKHYYYGGSYAMDYWGQGTSVTVSSTTTPAPRPPTPAPTIASQPLSLRPEACRPAAGGAVHTRGLDFACDIYIWAPLAGTCGVLLLSLVITLYCRRDQRLPPDAHKPPGGGSFRTPIQEEQADAHSTLAKIRVKFSRSADAPAYQQGQNQLYNELNLGRREEYDVLDKRRGRDPEMGGKPRRKNPQEGLYNELQKDKMAEAYSEIGMKGERRRGKGHDGLYQGLSTATKDTYDALHMQALPPR

SEQ ID NO: 903 - protein, 481 aa, Artificial Sequence
  Synthetic
MALPVTALLLPLALLLHAARPDIQMTQSPSSLSASVGDRVTITCRASQDISKYLNWYQQKPGGTVKLLIYHTSRLHSGVPSRFSGSGSGTDFTLTISSLQPEDIATYYCQQGNTLPYTFGGGTKLEITGGGGSGGGGSGGGGSQVQLQESGPGLVKPSQTLSLTCTVSGVSLPDYGVSWIRQPPGKGLEWLGVIWGSETTYYNSALKSRLTISKDNSKSQVSLKLSSVTAADTAVYYCAKHYYYGGSYAMDYWGQGTSVTVSSTTTPAPRPPTPAPTIASQPLSLRPEACRPAAGGAVHTRGLDFACDIYIWAPLAGTCGVLLLSLVITLYCRRDQRLPPDAHKPPGGGSFRTPIQEEQADAHSTLAKIRVKFSRSADAPAYQQGQNQLYNELNLGRREEYDVLDKRRGRDPEMGGKPRRKNPQEGLYNELQKDKMAEAYSEIGMKGERRRGKGHDGLYQGLSTATKDTYDALHMQALPPR

SEQ ID NO: 904 - protein, 482 aa, Artificial Sequence
  Synthetic
MALPVTALLLPLALLLHAARPDIQMTQSPSSLSASVGDRVTITCRASQDISKYLNWYQQKPGGTVKLLIYHTSRLHSGVPSRFSGSGSGTDFTLTISSLQPEDIATYFCQQGNTLPYTFGGGTKLEITGGGGSGGGGSGGGGSQVQLQESGPGLVKPSQTLSLTCTVSGVSLPDYGVSWIRQPPGKGLEWLGVIWGSETTYYNSALKSRLTISKDNSKSQVSLKLSSVTAADTAVYYCAKHYYYGGSYAMDYWGQGTSVTVSSTTTPAPRPPTPAPTIASQPLSLRPEACRPAAGGAVHTRGLDFACDIYIWAPLAGTCGVLLLSLVITLYCRRDQRLPPDAHKPPGGGSFRTPIQEEQADAHSTLAKIRVKFSRSSADAPAYQQGQNQLYNELNLGRREEYDVLDKRRGRDPEMGGKPRRKNPQEGLYNELQKDKMAEAYSEIGMKGERRRGKGHDGLYQGLSTATKDTYDALHMQALPPR

SEQ ID NO: 905 - protein, 481 aa, Artificial Sequence
  Synthetic
MALPVTALLLPLALLLHAARPDIQMTQSPSSLSASVGDRVTITCRASQDISKYLNWYQQKPDGTVKLLIYHTSRLHSGVPSRFSGSGSGTDYTLTISSLQPEDIATYFCQQGNTLPYTFGGGTKLEITGGGGSGGGGSGGGGSQVQLQESGPGLVKPSQTLSLTCTVSGVSLPDYGVSWIRQPPGKGLEWLGVIWGSETTYYNSALKSRLTISKDNSKSQVSLKLSSVTAADTAVYYCAKHYYYGGSYAMDYWGQGTSVTVSSTTTPAPRPPTPAPTIASQPLSLRPEACRPAAGGAVHTRGLDFACDIYIWAPLAGTCGVLLLSLVITLYCRRDQRLPPDAHKPPGGGSFRTPIQEEQADAHSTLAKIRVKFSRSADAPAYQQGQNQLYNELNLGRREEYDVLDKRRGRDPEMGGKPRRKNPQEGLYNELQKDKMAEAYSEIGMKGERRRGKGHDGLYQGLSTATKDTYDALHMQALPPR

SEQ ID NO: 906 - protein, 481 aa, Artificial Sequence
  Synthetic
MALPVTALLLPLALLLHAARPDIQMTQSPSSLSASVGDRVTITCRASQDISKYLNWYQQKPGGTVKLLIYHTSRLHSGVPSRFSGSGSGTDFTLTISSLQPEDIATYYCQQGNTLPYTFGGGTKLEITGGGGSGGGGSGGGGSQVQLQESGPGLVKPSQTLSVTCTVSGVSLPDYGVSWIRQPPGKGLEWLGVIWGSETTYYNSALKSRLTISKDNSKSQVSLKLSSVTAADTAVYYCAKHYYYGGSYAMDYWGQGTSVTVSSTTTPAPRPPTPAPTIASQPLSLRPEACRPAAGGAVHTRGLDFACDIYIWAPLAGTCGVLLLSLVITLYCRRDQRLPPDAHKPPGGGSFRTPIQEEQADAHSTLAKIRVKFSRSADAPAYQQGQNQLYNELNLGRREEYDVLDKRRGRDPEMGGKPRRKNPQEGLYNELQKDKMAEAYSEIGMKGERRRGKGHDGLYQGLSTATKDTYDALHMQALPPR

SEQ ID NO: 907 - protein, 481 aa, Artificial Sequence
  Synthetic
MALPVTALLLPLALLLHAARPDIQMTQSPSSLSASVGDRVTITCRASQDISKYLNWYQQKPGGTVKLLIYHTSRLHSGVPSRFSGSGSGTDFTLTISSLQPEDIATYFCQQGNTLPYTFGGGTKLEITGGGGSGGGGSGGGGSQVQLQESGPGLVKPSQTLSVTCTVSGVSLPDYGVSWIRQPPGKGLEWLGVIWGSETTYYNSALKSRLTISKDNSKSQVSLKLSSVTAADTAVYYCAKHYYYGGSYAMDYWGQGTSVTVSSTTTPAPRPPTPAPTIASQPLSLRPEACRPAAGGAVHTRGLDFACDIYIWAPLAGTCGVLLLSLVITLYCRRDQRLPPDAHKPPGGGSFRTPIQEEQADAHSTLAKIRVKFSRSADAPAYQQGQNQLYNELNLGRREEYDVLDKRRGRDPEMGGKPRRKNPQEGLYNELQKDKMAEAYSEIGMKGERRRGKGHDGLYQGLSTATKDTYDALHMQALPPR

SEQ ID NO: 908 - protein, 481 aa, Artificial Sequence
  Synthetic
MALPVTALLLPLALLLHAARPDIQMTQSPSSLSASVGDRVTITCRASQDISKYLNWYQQKPDGTVKLLIYHTSRLHSGVPSRFSGSGSGTDYTLTISSLQPEDIATYFCQQGNTLPYTFGGGTKLEITGGGGSGGGGSGGGGSQVQLQESGPGLVKPSQTLSVTCTVSGVSLPDYGVSWIRQPPGKGLEWLGVIWGSETTYYNSALKSRLTISKDNSKSQVSLKLSSVTAADTAVYYCAKHYYYGGSYAMDYWGQGTSVTVSSTTTPAPRPPTPAPTIASQPLSLRPEACRPAAGGAVHTRGLDFACDIYIWAPLAGTCGVLLLSLVITLYCRRDQRLPPDAHKPPGGGSFRTPIQEEQADAHSTLAKIRVKFSRSADAPAYQQGQNQLYNELNLGRREEYDVLDKRRGRDPEMGGKPRRKNPQEGLYNELQKDKMAEAYSEIGMKGERRRGKGHDGLYQGLSTATKDTYDALHMQALPPR

SEQ ID NO: 909 - protein, 481 aa, Artificial Sequence
  Synthetic
MALPVTALLLPLALLLHAARPDIQMTQSPSSLSASVGDRVTITCRASQDISKYLNWYQQKPGGTVKLLIYHTSRLHSGVPSRFSGSGSGTDFTLTISSLQPEDIATYYCQQGNTLPYTFGGGTKLEITGGGGSGGGGSGGGGSQVQLQESGPGLVKPSQTLSVTCTVSGVSLPDYGVSWIRQPPRKGLEWLGVIWGSETTYYNSALKSRLTISKDNSKSQVSLKMSSVTAADTAIYYCAKHYYYGGSYAMDYWGQGTSVTVSSTTTPAPRPPTPAPTIASQPLSLRPEACRPAAGGAVHTRGLDFACDIYIWAPLAGTCGVLLLSLVITLYCRRDQRLPPDAHKPPGGGSFRTPIQEEQADAHSTLAKIRVKFSRSADAPAYQQGQNQLYNELNLGRREEYDVLDKRRGRDPEMGGKPRRKNPQEGLYNELQKDKMAEAYSEIGMKGERRRGKGHDGLYQGLSTATKDTYDALHMQALPPR

SEQ ID NO: 910 - protein, 481 aa, Artificial Sequence
  Synthetic
MALPVTALLLPLALLLHAARPDIQMTQSPSSLSASVGDRVTITCRASQDISKYLNWYQQKPGGTVKLLIYHTSRLHSGVPSRFSGSGSGTDFTLTISSLQPEDIATYFCQQGNTLPYTFGGGTKLEITGGGGSGGGGSGGGGSQVQLQESGPGLVKPSQTLSVTCTVSGVSLPDYGVSWIRQPPRKGLEWLGVIWGSETTYYNSALKSRLTISKDNSKSQVSLKMSSVTAADTAIYYCAKHYYYGGSYAMDYWGQGTSVTVSSTTTPAPRPPTPAPTIASQPLSLRPEACRPAAGGAVHTRGLDFACDIYIWAPLAGTCGVLLLSLVITLYCRRDQRLPPDAHKPPGGGSFRTPIQEEQADAHSTLAKIRVKFSRSADAPAYQQGQNQLYNELNLGRREEYDVLDKRRGRDPEMGGKPRRKNPQEGLYNELQKDKMAEAYSEIGMKGERRRGKGHDGLYQGLSTATKDTYDALHMQALPPR

SEQ ID NO: 911 - protein, 481 aa, Artificial Sequence
  Synthetic
MALPVTALLLPLALLLHAARPDIQMTQSPSSLSASVGDRVTITCRASQDISKYLNWYQQKPDGTVKLLIYHTSRLHSGVPSRFSGSGSGTDYTLTISSLQPEDIATYFCQQGNTLPYTFGGGTKLEITGGGGSGGGGSGGGGSQVQLQESGPGLVKPSQTLSVTCTVSGVSLPDYGVSWIRQPPRKGLEWLGVIWGSETTYYNSALKSRLTISKDNSKSQVSLKMSSVTAADTAIYYCAKHYYYGGSYAMDYWGQGTSVTVSSTTTPAPRPPTPAPTIASQPLSLRPEACRPAAGGAVHTRGLDFACDIYIWAPLAGTCGVLLLSLVITLYCRRDQRLPPDAHKPPGGGSFRTPIQEEQADAHSTLAKIRVKFSRSADAPAYQQGQNQLYNELNLGRREEYDVLDKRRGRDPEMGGKPRRKNPQEGLYNELQKDKMAEAYSEIGMKGERRRGKGHDGLYQGLSTATKDTYDALHMQALPPR

SEQ ID NO: 912 - protein, 497 aa, Artificial Sequence
  Synthetic
MALPVTALLLPLALLLHAARPDYKDDDDKGGGGSGGGGSQVQLVQSGAEVKKPGASVKVSCKASGYTFTGHYLHWVRQAPGQGLEWMGWINPNSGGTNYAQKFQGRVTMTRDTSTSTVYMELSSLRSEDTAVYYCVRGSGWYDLDYWGQGTLVTVSSGGGGSGGGGSGGGGSDIQMTQSPSSLSASVGDRVTITCRASQNIGTYLAWYQQKPGKAPKLLIYDASNLETGVPSRFSGSGSGTDFTLTISSLQPEDFATYYCQQSYRIPLTFGQGTRLEIKTTTPAPRPPTPAPTIASQPLSLRPEACRPAAGGAVHTRGLDFACDIYIWAPLAGTCGVLLLSLVITLYCRRDQRLPPDAHKPPGGGSFRTPIQEEQADAHSTLAKIRVKFSRSADAPAYQQGQNQLYNELNLGRREEYDVLDKRRGRDPEMGGKPRRKNPQEGLYNELQKDKMAEAYSEIGMKGERRRGKGHDGLYQGLSTATKDTYDALHMQALPPR

SEQ ID NO: 913 - protein, 498 aa, Artificial Sequence
  Synthetic
MALPVTALLLPLALLLHAARPDYKDDDDKGGGGSGGGGSQVQLVQSGAEVKKPGASVKVSCKASGYTFTNYYMHWVRQAPGQGLEWMGIINPSGGSTSYAQKFQGRVTMTRDTSTSTVYMELSSLRSEDTAVYYCARELGVAGYFDLWGRGTLVTVSSGGGGSGGGGSGGGGSDIQMTQSPSSLSASVGDRVTITCRASQRISNWLAWYQQKPGKAPKLLIYDASNLETGVPSRFSGSGSGTDFTLTISSLQPEDFATYYCQQTYSPPPTFGQGTKLEIKTTTPAPRPPTPAPTIASQPLSLRPEACRPAAGGAVHTRGLDFACDIYIWAPLAGTCGVLLLSLVITLYCRRDQRLPPDAHKPPGGGSFRTPIQEEQADAHSTLAKIRVKFSRSADAPAYQQGQNQLYNELNLGRREEYDVLDKRRGRDPEMGGKPRRKNPQEGLYNELQKDKMAEAYSEIGMKGERRRGKGHDGLYQGLSTATKDTYDALHMQALPPR

SEQ ID NO: 914 - protein, 507 aa, Artificial Sequence
  Synthetic
MALPVTALLLPLALLLHAARPDYKDDDDKGGGGSGGGGSQVQLVQSGAEVKKPGASVKVSCKASGYTFTGYYIHWVRQAPGQGLEWMGIINPSGGSTSYAQKFQGRVTMTRDTSTSTVYMELSSLRSEDTAVYYCARDLSGIDGYIGFFDYWGQGTLVTVSSGGGGSGGGGSGGGGSDIVMTQSPLSLPVTPGEPASISCRSSQSLLHSNGYNYLDWYLQKPGQSPQLLIYAASSLQSGVPDRFSGSGSGTDFTLKISRVEAEDVGVYYCMQALQTPITFGQGTRLEIKTTTPAPRPPTPAPTIASQPLSLRPEACRPAAGGAVHTRGLDFACDIYIWAPLAGTCGVLLLSLVITLYCRRDQRLPPDAHKPPGGGSFRTPIQEEQADAHSTLAKIRVKFSRSADAPAYQQGQNQLYNELNLGRREEYDVLDKRRGRDPEMGGKPRRKNPQEGLYNELQKDKMAEAYSEIGMKGERRRGKGHDGLYQGLSTATKDTYDALHMQALPPR

SEQ ID NO: 915 - protein, 498 aa, Artificial Sequence
  Synthetic
MALPVTALLLPLALLLHAARPDYKDDDDKGGGGSGGGGSQVQLVQSGAEVKKPGASVKVSCKASGGTFRSHVISWVRQAPGQGLEWMGIIDPSGGSTSYAQRFQGRVTMTRDTSTSTVYMELSSLRSEDTAVYYCAKDYTGLLGMDVWGQGTTVTVSSGGGGSGGGGSGGGGSDIQMTQSPSSLSASVGDRVTITCRASQDIDTYLAWYQQKPGKAPKLLIYAASSLQSGVPSRFSGSGSGTDFTLTISSLQPEDFATYYCQQSYTTPFTFGQGTKVEIKTTTPAPRPPTPAPTIASQPLSLRPEACRPAAGGAVHTRGLDFACDIYIWAPLAGTCGVLLLSLVITLYCRRDQRLPPDAHKPPGGGSFRTPIQEEQADAHSTLAKIRVKFSRSADAPAYQQGQNQLYNELNLGRREEYDVLDKRRGRDPEMGGKPRRKNPQEGLYNELQKDKMAEAYSEIGMKGERRRGKGHDGLYQGLSTATKDTYDALHMQALPPR

SEQ ID NO: 916 - protein, 498 aa, Artificial Sequence
  Synthetic
MALPVTALLLPLALLLHAARPDYKDDDDKGGGGSGGGGSQVQLVQSGAEVKKPGASVKVSCKASGYTFIDYYIHWVRQAPGQGLEWMGWMNPNSGNTGYAQKFQGRVTMTRDTSTSTVYMELSSLRSEDTAVYYCARGLSGYDLDDYWGQGTLVTVSSGGGGSGGGGSGGGGSDIQMTQSPSSLSASVGDRVTITCQASQDISNYLNWYQQKPGKAPKLLIYDASSLESGVPSRFSGSGSGTDFTLTISSLQPEDFATYYCQQSYRSPLTFGGGTKVEIKTTTPAPRPPTPAPTIASQPLSLRPEACRPAAGGAVHTRGLDFACDIYIWAPLAGTCGVLLLSLVITLYCRRDQRLPPDAHKPPGGGSFRTPIQEEQADAHSTLAKIRVKFSRSADAPAYQQGQNQLYNELNLGRREEYDVLDKRRGRDPEMGGKPRRKNPQEGLYNELQKDKMAEAYSEIGMKGERRRGKGHDGLYQGLSTATKDTYDALHMQALPPR

SEQ ID NO: 917 - protein, 497 aa, Artificial Sequence
  Synthetic
MALPVTALLLPLALLLHAARPDYKDDDDKGGGGSGGGGSQVQLVQSGAEVKKPGASVKVSCKASGYTFTSYYMHWVRQAPGQGLEWMGWINPNSGGTKYAHKFQGRVTMTRDTSTSTVYMELSSLRSEDTAVYYCARGLSGYDFDYWGQGTTVTVSSGGGGSGGGGSGGGGSDIQMTQSPSSLSASVGDRVTITCQASQDISNYLNWYQQKPGKAPKLLIYDASNLETGVPSRFSGSGSGTDFTLTISSLQPEDFATYYCQQAYRWPITFGQGTRLEIKTTTPAPRPPTPAPTIASQPLSLRPEACRPAAGGAVHTRGLDFACDIYIWAPLAGTCGVLLLSLVITLYCRRDQRLPPDAHKPPGGGSFRTPIQEEQADAHSTLAKIRVKFSRSADAPAYQQGQNQLYNELNLGRREEYDVLDKRRGRDPEMGGKPRRKNPQEGLYNELQKDKMAEAYSEIGMKGERRRGKGHDGLYQGLSTATKDTYDALHMQALPPR

SEQ ID NO: 918 - protein, 498 aa, Artificial Sequence
  Synthetic
MALPVTALLLPLALLLHAARPDYKDDDDKGGGGSGGGGSQVQLVQSGAEVKKPGASVKVSCKASGYTFTGYYMHWVRQAPGQGLEWMGWMNPNSGNTGYAQKFQGRVTMTRDTSTSTVYMELSSLRSEDTAVYYCARGTDVYGDFDYWGQGTLVTVSSGGGGSGGGGSGGGGSDIQMTQSPSSLSASVGDRVTITCRASQSISSYLNWYQQKPGKAPKLLIYDASYLETGVPSRFSGSGSGTDFTLTISSLQPEDFATYYCQQSYTIPPTFGQGTKVEIKTTTPAPRPPTPAPTIASQPLSLRPEACRPAAGGAVHTRGLDFACDIYIWAPLAGTCGVLLLSLVITLYCRRDQRLPPDAHKPPGGGSFRTPIQEEQADAHSTLAKIRVKFSRSADAPAYQQGQNQLYNELNLGRREEYDVLDKRRGRDPEMGGKPRRKNPQEGLYNELQKDKMAEAYSEIGMKGERRRGKGHDGLYQGLSTATKDTYDALHMQALPPR

SEQ ID NO: 919 - protein, 505 aa, Artificial Sequence
  Synthetic
MALPVTALLLPLALLLHAARPDYKDDDDKGGGGSGGGGSQVQLVQSGAEVKKPGSSVKVSCKASGYTFTENEMHWVRQAPGQGLEWMGGIIPIFGTANYAQKFQGRVTITADESTSTAYMELSSLRSEDTAVYYCAREGGTAMATGYYYYGMDVWGQGTTVTVSSGGGGSGGGGSGGGGSDIQMTQSPSSLSASVGDRVTITCQASQDISNYLNWYQQKPGKAPKLLIYDASNLETGVPSRFSGSGSGTDFTLTISSLQPEDFATYYCQQSYSTPLTFGQGTKVEIKTTTPAPRPPTPAPTIASQPLSLRPEACRPAAGGAVHTRGLDFACDIYIWAPLAGTCGVLLLSLVITLYCRRDQRLPPDAHKPPGGGSFRTPIQEEQADAHSTLAKIRVKFSRSADAPAYQQGQNQLYNELNLGRREEYDVLDKRRGRDPEMGGKPRRKNPQEGLYNELQKDKMAEAYSEIGMKGERRRGKGHDGLYQGLSTATKDTYDALHMQALPPR

SEQ ID NO: 920 - protein, 503 aa, Artificial Sequence
  Synthetic
MALPVTALLLPLALLLHAARPDYKDDDDKGGGGSGGGGSQVQLVQSGAEVKKPGASVKVSCKASGYTFTENEMHWVRQAPGQGLEWMGWINSNGGYTGYALKFQGRVTMTRDTSTSTVYMELSSLRSEDTAVYYCARASNYGGHFDYWGQGTLVTVSSGGGGSGGGGSGGGGSDIVMTQSPLSLPVTPGEPASISCRSSQSLLHSNGYNYLDWYLQKPGQSPQLLIYQASSLESGVPDRFSGSGSGTDFTLKISRVEAEDVGVYYCMQGTHWPPTFGGGTKVEIKTTTPAPRPPTPAPTIASQPLSLRPEACRPAAGGAVHTRGLDFACDIYIWAPLAGTCGVLLLSLVITLYCRRDQRLPPDAHKPPGGGSFRTPIQEEQADAHSTLAKIRVKFSRSADAPAYQQGQNQLYNELNLGRREEYDVLDKRRGRDPEMGGKPRRKNPQEGLYNELQKDKMAEAYSEIGMKGERRRGKGHDGLYQGLSTATKDTYDALHMQALPPR

SEQ ID NO: 921 - protein, 498 aa, Artificial Sequence
  Synthetic
MALPVTALLLPLALLLHAARPDYKDDDDKGGGGSGGGGSQVQLVQSGAEVKKPGASVKVSCKASGYTFTSYYMHWVRQAPGQGLEWMGIINPSGGSTIYAQKFQGRVTMTRDTSTSTVYMELSSLRSEDTAVYYCAKDMGAWAAGFDYWGQGTLVTVSSGGGGSGGGGSGGGGSDIQMTQSPSSLSASVGDRVTITCQASQDISNYLNWYQQKPGKAPKLLIYATSTLANGVPSRFSGSGSGTDFTLTISSLQPEDFATYYCQQSYSTLTFGQGTRLEIKTTTPAPRPPTPAPTIASQPLSLRPEACRPAAGGAVHTRGLDFACDIYIWAPLAGTCGVLLLSLVITLYCRRDQRLPPDAHKPPGGGSFRTPIQEEQADAHSTLAKIRVKFSRSADAPAYQQGQNQLYNELNLGRREEYDVLDKRRGRDPEMGGKPRRKNPQEGLYNELQKDKMAEAYSEIGMKGERRRGKGHDGLYQGLSTATKDTYDALHMQALPPR

SEQ ID NO: 922 - protein, 499 aa, Artificial Sequence
  Synthetic
MALPVTALLLPLALLLHAARPDYKDDDDKGGGGSGGGGSQVQLVQSGAEVKKPGASVKVSCKASGYTFTGYYMHWVRQAPGQGLEWMGWINPNSGDTGYAQKFQGRVTMTRDTSTSTVYMELSSLRSEDTAVYYCARSVNDYGDYDGYWGQGTLVTVSSGGGGSGGGGSGGGGSDIQMTQSPSSLSASVGDRVTITCQASQDISNYLNWYQQKPGKAPKLLIYDASNLETGVPSRFSGSGSGTDFTLTISSLQPEDFATYYCQQSYSTPPTFGQGTKVEIKTTTPAPRPPTPAPTIASQPLSLRPEACRPAAGGAVHTRGLDFACDIYIWAPLAGTCGVLLLSLVITLYCRRDQRLPPDAHKPPGGGSFRTPIQEEQADAHSTLAKIRVKFSRSADAPAYQQGQNQLYNELNLGRREEYDVLDKRRGRDPEMGGKPRRKNPQEGLYNELQKDKMAEAYSEIGMKGERRRGKGHDGLYQGLSTATKDTYDALHMQALPPR

SEQ ID NO: 923 - protein, 499 aa, Artificial Sequence
  Synthetic
MALPVTALLLPLALLLHAARPDYKDDDDKGGGGSGGGGSQVQLVQSGAEVKKPGASVKVSCKASGYTFTGYYMHWVRQAPGQGLEWMGIINPSGGSTSYAQKFQGRVTMTRDTSTSTVYMELSSLRSEDTAVYYCARDYGDYDASFDYWGQGTLVTVSSGGGGSGGGGSGGGGSDIQMTQSPSSLSASVGDRVTITCRASQSIDNWLAWYQQKPGKAPKLLIYAASTLQSGVPSRFSGSGSGTDFTLTISSLQPEDFATYYCQQSYDSPPTFGQGTKLEIKTTTPAPRPPTPAPTIASQPLSLRPEACRPAAGGAVHTRGLDFACDIYIWAPLAGTCGVLLLSLVITLYCRRDQRLPPDAHKPPGGGSFRTPIQEEQADAHSTLAKIRVKFSRSADAPAYQQGQNQLYNELNLGRREEYDVLDKRRGRDPEMGGKPRRKNPQEGLYNELQKDKMAEAYSEIGMKGERRRGKGHDGLYQGLSTATKDTYDALHMQALPPR

SEQ ID NO: 924 - protein, 496 aa, Artificial Sequence
  Synthetic
MALPVTALLLPLALLLHAARPDYKDDDDKGGGGSGGGGSQVQLVQSGAEVKKPGASVKVSCKASGYTFTSYDINWVRQAPGQGLEWMGIINPSDGSTIYAQNFQGRVTMTRDTSTSTVYMELSSLRSEDTAVYYCVKEEAWYFDLWGRGTLVTVSSGGGGSGGGGSGGGGSDIQMTQSPSSLSASVGDRVTITCQASQDISNYLNWYQQKPGKAPKLLIYDASNLETGVPSRFSGSGSGTDFTLTISSLQPEDFATYYCQQSYSTPLTFGGGTKVEIKTTTPAPRPPTPAPTIASQPLSLRPEACRPAAGGAVHTRGLDFACDIYIWAPLAGTCGVLLLSLVITLYCRRDQRLPPDAHKPPGGGSFRTPIQEEQADAHSTLAKIRVKFSRSADAPAYQQGQNQLYNELNLGRREEYDVLDKRRGRDPEMGGKPRRKNPQEGLYNELQKDKMAEAYSEIGMKGERRRGKGHDGLYQGLSTATKDTYDALHMQALPPR

SEQ ID NO: 925 - protein, 496 aa, Artificial Sequence
  Synthetic
MALPVTALLLPLALLLHAARPDYKDDDDKGGGGSGGGGSQVQLVQSGAEVKKPGASVKVSCKASGYTFTSYYMHWVRQAPGQGLEWMGWMNPDNGDTGYAQMFQGRVTMTRDTSTSTVYMELSSLRSEDTAVYYCASGDYYDILYWGQGTLVTVSSGGGGSGGGGSGGGGSDIQMTQSPSSLSASVGDRVTITCQASQDISNYLNWYQQKPGKAPKLLIYDVSNLETGVPSRFSGSGSGTDFTLTISSLQPEDFATYYCQQANSFPLTFGGGTKVEIKTTTPAPRPPTPAPTIASQPLSLRPEACRPAAGGAVHTRGLDFACDIYIWAPLAGTCGVLLLSLVITLYCRRDQRLPPDAHKPPGGGSFRTPIQEEQADAHSTLAKIRVKFSRSADAPAYQQGQNQLYNELNLGRREEYDVLDKRRGRDPEMGGKPRRKNPQEGLYNELQKDKMAEAYSEIGMKGERRRGKGHDGLYQGLSTATKDTYDALHMQALPPR

SEQ ID NO: 926 - protein, 497 aa, Artificial Sequence
  Synthetic
MALPVTALLLPLALLLHAARPDYKDDDDKGGGGSGGGGSQVQLVQSGAEVKKPGASVKVSCKASGYTFTSYYMHWVRQAPGQGLEWMGWMNPNSGDTGYAQKFQGRVTMTRDTSTSTVYMELSSLRSEDTAVYYCARGPSGYEFDYWGQGTLVTVSSGGGGSGGGGSGGGGSDIQMTQSPSSLSASVGDRVTITCRASQTISNYLNWYQQKPGKAPKLLIYDASSLESGVPSRFSGSGSGTDFTLTISSLQPEDFATYYCQQAISFPLTFGGGTKVEIKTTTPAPRPPTPAPTIASQPLSLRPEACRPAAGGAVHTRGLDFACDIYIWAPLAGTCGVLLLSLVITLYCRRDQRLPPDAHKPPGGGSFRTPIQEEQADAHSTLAKIRVKFSRSADAPAYQQGQNQLYNELNLGRREEYDVLDKRRGRDPEMGGKPRRKNPQEGLYNELQKDKMAEAYSEIGMKGERRRGKGHDGLYQGLSTATKDTYDALHMQALPPR

SEQ ID NO: 927 - protein, 501 aa, Artificial Sequence
  Synthetic
MALPVTALLLPLALLLHAARPDYKDDDDKGGGGSGGGGSQVQLVQSGAEVKKPGASVKVSCKASGYTFTDYYMHWVRQAPGQGLEWMGIINPNSGGTNYAQKFQGRVTMTRDTSTSTVYMELSSLRSEDTAVYYCARDFSVYAAADGMDVWGQGTLVTVSSGGGGSGGGGSGGGGSDIQMTQSPSSLSASVGDRVTITCRASQSISSYLNWYQQKPGKAPKLLIYDASNLATGVPSRFSGSGSGTDFTLTISSLQPEDFATYYCQQSDSSPLTFGQGTKVEIKTTTPAPRPPTPAPTIASQPLSLRPEACRPAAGGAVHTRGLDFACDIYIWAPLAGTCGVLLLSLVITLYCRRDQRLPPDAHKPPGGGSFRTPIQEEQADAHSTLAKIRVKFSRSADAPAYQQGQNQLYNELNLGRREEYDVLDKRRGRDPEMGGKPRRKNPQEGLYNELQKDKMAEAYSEIGMKGERRRGKGHDGLYQGLSTATKDTYDALHMQALPPR

SEQ ID NO: 928 - protein, 500 aa, Artificial Sequence
  Synthetic
MALPVTALLLPLALLLHAARPDYKDDDDKGGGGSGGGGSQVQLVQSGAEVKKPGASVKVSCKASGYTFTGYYMHWVRQAPGQGLEWMGIINPGDGGTIYAQNFQGRVTMTRDTSTSTVYMELSSLRSEDTAVYYCARGFGESAPDAFDIWGQGTMVTVSSGGGGSGGGGSGGGGSDIQMTQSPSSLSASVGDRVTITCQASQDISNYLNWYQQKPGKAPKLLIYGATTLQSGVPSRFSGSGSGTDFTLTISSLQPEDFATYYCQQADSFPYTFGQGTKLEIKTTTPAPRPPTPAPTIASQPLSLRPEACRPAAGGAVHTRGLDFACDIYIWAPLAGTCGVLLLSLVITLYCRRDQRLPPDAHKPPGGGSFRTPIQEEQADAHSTLAKIRVKFSRSADAPAYQQGQNQLYNELNLGRREEYDVLDKRRGRDPEMGGKPRRKNPQEGLYNELQKDKMAEAYSEIGMKGERRRGKGHDGLYQGLSTATKDTYDALHMQALPPR

SEQ ID NO: 929 - protein, 497 aa, Artificial Sequence
  Synthetic
MALPVTALLLPLALLLHAARPDYKDDDDKGGGGSGGGGSQVQLVQSGAEVKKPGASVKVSCKASGYTFTGYYMHWVRQAPGQGLEWMGIINPSGGSTSYAQKFQGRVTMTRDTSTSTVYMELSSLRSEDTAVYYCAAGTEIYYMDVWGKGTTVTVSSGGGGSGGGGSGGGGSDIQMTQSPSSLSASVGDRVTITCRASQTIDIYLNWYQQKPGKAPKLLIYDASNLETGVPSRFSGSGSGTDFTLTISSLQPEDFATYYCQQADSFPLTFGGGTKVEIKTTTPAPRPPTPAPTIASQPLSLRPEACRPAAGGAVHTRGLDFACDIYIWAPLAGTCGVLLLSLVITLYCRRDQRLPPDAHKPPGGGSFRTPIQEEQADAHSTLAKIRVKFSRSADAPAYQQGQNQLYNELNLGRREEYDVLDKRRGRDPEMGGKPRRKNPQEGLYNELQKDKMAEAYSEIGMKGERRRGKGHDGLYQGLSTATKDTYDALHMQALPPR

SEQ ID NO: 930 - protein, 506 aa, Artificial Sequence
  Synthetic
MALPVTALLLPLALLLHAARPDYKDDDDKGGGGSGGGGSQVQLVQSGAEVKKPGASVKVSCKASGGTFSSYAISWVRQAPGQGLEWMGMINPSDGATTYAQKFQGRVTMTRDTSTSTVYMELSSLRSEDTAVYYCARERELLHFATNYYYYGMDVWGQGTTVTVSSGGGGSGGGGSGGGGSDIQMTQSPSSLSASVGDRVTITCRASQGISNNLNWYQQKPGKAPKLLIYAASSLHSGVPSRFSGSGSGTDFTLTISSLQPEDFATYYCQQADAFPLTFGGGTKVEIKTTTPAPRPPTPAPTIASQPLSLRPEACRPAAGGAVHTRGLDFACDIYIWAPLAGTCGVLLLSLVITLYCRRDQRLPPDAHKPPGGGSFRTPIQEEQADAHSTLAKIRVKFSRSADAPAYQQGQNQLYNELNLGRREEYDVLDKRRGRDPEMGGKPRRKNPQEGLYNELQKDKMAEAYSEIGMKGERRRGKGHDGLYQGLSTATKDTYDALHMQALPPR

SEQ ID NO: 931 - protein, 502 aa, Artificial Sequence
  Synthetic
MALPVTALLLPLALLLHAARPDYKDDDDKGGGGSGGGGSQVQLVQSGAEVKKPGASVKVSCKASGYTFTRNYMHWVRQAPGQGLEWMGWISPDNGVTNYAQNFQGRVTMTRDTSTSTVYMELSSLRSEDTAVYYCAKTQGSSSWYQWYFDLWGRGTLVTVSSGGGGSGGGGSGGGGSDIQMTQSPSSLSASVGDRVTITCRASQSIGTWLAWYQQKPGKAPKLLIYAASSLQSGVPSRFSGSGSGTDFTLTISSLQPEDFATYYCQQSYTTPITFGQGTKVEIKTTTPAPRPPTPAPTIASQPLSLRPEACRPAAGGAVHTRGLDFACDIYIWAPLAGTCGVLLLSLVITLYCRRDQRLPPDAHKPPGGGSFRTPIQEEQADAHSTLAKIRVKFSRSADAPAYQQGQNQLYNELNLGRREEYDVLDKRRGRDPEMGGKPRRKNPQEGLYNELQKDKMAEAYSEIGMKGERRRGKGHDGLYQGLSTATKDTYDALHMQALPPR

SEQ ID NO: 932 - protein, 498 aa, Artificial Sequence
  Synthetic
MALPVTALLLPLALLLHAARPDYKDDDDKGGGGSGGGGSQVQLVQSGAEVKKPGASVKVSCKASGYTFTSYYMHWVRQAPGQGLEWMGIIDPGSGDTSYAQKFQGRVTMTRDTSTSTVYMELSSLRSEDTAVYYCARGSNWYDYFDYWGQGTLVTVSSGGGGSGGGGSGGGGSEIVMTQSPATLSVSPGERATLSCRASQSVSSYLAWYQQKPGQAPRLLIYGASTRATGIPARFSGSGSGTEFTLTISSLQSEDFAVYYCQQYDSYPPTFGGGTKVEIKTTTPAPRPPTPAPTIASQPLSLRPEACRPAAGGAVHTRGLDFACDIYIWAPLAGTCGVLLLSLVITLYCRRDQRLPPDAHKPPGGGSFRTPIQEEQADAHSTLAKIRVKFSRSADAPAYQQGQNQLYNELNLGRREEYDVLDKRRGRDPEMGGKPRRKNPQEGLYNELQKDKMAEAYSEIGMKGERRRGKGHDGLYQGLSTATKDTYDALHMQALPPR

SEQ ID NO: 933 - protein, 498 aa, Artificial Sequence
  Synthetic
MALPVTALLLPLALLLHAARPDYKDDDDKGGGGSGGGGSQVQLVQSGAEVKKPGASVKVSCKASGYRLSDHYMHWVRQAPGQGLEWMGIINPSGGSTTYAQNFQGRVTMTRDTSTSTVYMELSSLRSEDTAVYYCASSYYGDYVLVNWGQGTLVTVSSGGGGSGGGGSGGGGSDIQMTQSPSSLSASVGDRVTITCQASQDISNYLNWYQQKPGKAPKLLIYAASTLESGVPSRFSGSGSGTDFTLTISSLQPEDFATYYCLQDYDYPLTFGQGTKLEIKTTTPAPRPPTPAPTIASQPLSLRPEACRPAAGGAVHTRGLDFACDIYIWAPLAGTCGVLLLSLVITLYCRRDQRLPPDAHKPPGGGSFRTPIQEEQADAHSTLAKIRVKFSRSADAPAYQQGQNQLYNELNLGRREEYDVLDKRRGRDPEMGGKPRRKNPQEGLYNELQKDKMAEAYSEIGMKGERRRGKGHDGLYQGLSTATKDTYDALHMQALPPR

SEQ ID NO: 934 - protein, 499 aa, Artificial Sequence
  Synthetic
MALPVTALLLPLALLLHAARPDYKDDDDKGGGGSGGGGSQVQLVQSGAEVKKPGASVKVSCKASGYTFTDYYVHWVRQAPGQGLEWMGWINPNTGGTSFAQNFQGRVTMTRDTSTSTVYMELSSLRSEDTAVYYCARDLGQWLGEIDYWGQGTLVTVSSGGGGSGGGGSGGGGSDIQMTQSPSSLSASVGDRVTITCRASQTIYKWLAWYQQKPGKAPKLLIYDASSLESGVPSRFSGSGSGTDFTLTISSLQPEDFATYYCQQANSFPFTFGPGTKVDIKTTTPAPRPPTPAPTIASQPLSLRPEACRPAAGGAVHTRGLDFACDIYIWAPLAGTCGVLLLSLVITLYCRRDQRLPPDAHKPPGGGSFRTPIQEEQADAHSTLAKIRVKFSRSADAPAYQQGQNQLYNELNLGRREEYDVLDKRRGRDPEMGGKPRRKNPQEGLYNELQKDKMAEAYSEIGMKGERRRGKGHDGLYQGLSTATKDTYDALHMQALPPR

SEQ ID NO: 935 - protein, 503 aa, Artificial Sequence
  Synthetic
MALPVTALLLPLALLLHAARPDYKDDDDKGGGGSGGGGSQVQLVQSGAEVKKPGASVKVSCKASGYTFTDYTDYFVHWVRQAPGQGLEWMGIFNPSDGSTSYAQEFQGRVTMTRDTSTSTVYMELSSLRSEDTAVYYCARGPYSSSWYYFDYWGQGTLVTVSSGGGGSGGGGSGGGGSDIQMTQSPSSLSASVGDRVTITCQASQDISNYLNWYQQKPGKAPKLLIYDASNLETGVPSRFSGSGSGTDFTLTISSLQPEDFATYYCQQAHSFPPTFGQGTKVEIKTTTPAPRPPTPAPTIASQPLSLRPEACRPAAGGAVHTRGLDFACDIYIWAPLAGTCGVLLLSLVITLYCRRDQRLPPDAHKPPGGGSFRTPIQEEQADAHSTLAKIRVKFSRSADAPAYQQGQNQLYNELNLGRREEYDVLDKRRGRDPEMGGKPRRKNPQEGLYNELQKDKMAEAYSEIGMKGERRRGKGHDGLYQGLSTATKDTYDALHMQALPPR

SEQ ID NO: 936 - protein, 499 aa, Artificial Sequence
  Synthetic
MALPVTALLLPLALLLHAARPDYKDDDDKGGGGSGGGGSQVQLVQSGAEVKKPGASVKVSCKASGYIFTDYYMHWVRQAPGQGLEWMGIINPSGGDTLYAQKFQGRVTMTRDTSTSTVYMELSSLRSEDTAVYYCAREGVGAMGVFDYWGQGTLVTVSSGGGGSGGGGSGGGGSDIQMTQSPSSLSASVGDRVTITCRASTSISDYVHWYQQKPGKAPKLLIYDASSLQSGVPSRFSGSGSGTDFTLTISSLQPEDFATYYCQQSDSTPPTFGGGTKVEIKTTTPAPRPPTPAPTIASQPLSLRPEACRPAAGGAVHTRGLDFACDIYIWAPLAGTCGVLLLSLVITLYCRRDQRLPPDAHKPPGGGSFRTPIQEEQADAHSTLAKIRVKFSRSADAPAYQQGQNQLYNELNLGRREEYDVLDKRRGRDPEMGGKPRRKNPQEGLYNELQKDKMAEAYSEIGMKGERRRGKGHDGLYQGLSTATKDTYDALHMQALPPR

SEQ ID NO: 937 - protein, 501 aa, Artificial Sequence
  Synthetic
MALPVTALLLPLALLLHAARPDYKDDDDKGGGGSGGGGSQVQLVQSGAEVKKPGASVKVSCKASGYTFTDHYIHWVRQAPGQGLEWMGWISAYNGKTNYAQKFQGRVTMTRDTSTSTVYMELSSLRSEDTAVYYCARDTIYYDFWSGYDYWGQGTLVTVSSGGGGSGGGGSGGGGSDIQMTQSPSSLSASVGDRVTITCRASQGISNNLNWYQQKPGKAPKLLIYYASTLQSGVPSRFSGSGSGTDFTLTISSLQPEDFATYYCQQSYSTPITFGQGTRLEIKTTTPAPRPPTPAPTIASQPLSLRPEACRPAAGGAVHTRGLDFACDIYIWAPLAGTCGVLLLSLVITLYCRRDQRLPPDAHKPPGGGSFRTPIQEEQADAHSTLAKIRVKFSRSADAPAYQQGQNQLYNELNLGRREEYDVLDKRRGRDPEMGGKPRRKNPQEGLYNELQKDKMAEAYSEIGMKGERRRGKGHDGLYQGLSTATKDTYDALHMQALPPR

SEQ ID NO: 938 - protein, 501 aa, Artificial Sequence
  Synthetic
MALPVTALLLPLALLLHAARPDYKDDDDKGGGGSGGGGSQVQLVQSGAEVKKPGASVKVSCKASGYTFTSYYMHWVRQAPGQGLEWMGIINPSGGATIYAQKFQGRVTMTRDTSTSTVYMELSSLRSEDTAVYYCARSRGDYYGSGDFDYWGQGTLVTVSSGGGGSGGGGSGGGGSDIQMTQSPSSLSASVGDRVTITCRASQTISNYLNWYQQKPGKAPKLLIYDASTLEAGVPSRFSGSGSGTDFTLTISSLQPEDFATYYCQQSYNPPYTFGQGTKLEIKTTTPAPRPPTPAPTIASQPLSLRPEACRPAAGGAVHTRGLDFACDIYIWAPLAGTCGVLLLSLVITLYCRRDQRLPPDAHKPPGGGSFRTPIQEEQADAHSTLAKIRVKFSRSADAPAYQQGQNQLYNELNLGRREEYDVLDKRRGRDPEMGGKPRRKNPQEGLYNELQKDKMAEAYSEIGMKGERRRGKGHDGLYQGLSTATKDTYDALHMQALPPR

SEQ ID NO: 939 - protein, 497 aa, Artificial Sequence
  Synthetic
MALPVTALLLPLALLLHAARPDYKDDDDKGGGGSGGGGSQVQLVQSGAEVKKPGASVKVSCKASGYTFTDYYMHWVRQAPGQGLEWMGIINPSGGSTSYAQKFQGRVTMTRDTSTSTVYMELSSLRSEDTAVYYCARGYFDHAFDIWGQGTMVTVSSGGGGSGGGGSGGGGSDIQMTQSPSSLSASVGDRVTITCRASQSISTYLNWYQQKPGKAPKLLIYDASNLEIGVPSRFSGSGSGTDFTLTISSLQPEDFATYYCQQSDSSPLTFGQGTKVEIKTTTPAPRPPTPAPTIASQPLSLRPEACRPAAGGAVHTRGLDFACDIYIWAPLAGTCGVLLLSLVITLYCRRDQRLPPDAHKPPGGGSFRTPIQEEQADAHSTLAKIRVKFSRSADAPAYQQGQNQLYNELNLGRREEYDVLDKRRGRDPEMGGKPRRKNPQEGLYNELQKDKMAEAYSEIGMKGERRRGKGHDGLYQGLSTATKDTYDALHMQALPPR

SEQ ID NO: 940 - protein, 503 aa, Artificial Sequence
  Synthetic
MALPVTALLLPLALLLHAARPDYKDDDDKGGGGSGGGGSQVQLVQSGAEVKKPGASVKVSCKASGYTFTGYYMHWVRQAPGQGLEWMGIINPSGGDTIYAQKFQGRVTMTRDTSTSTVYMELSSLRSEDTAVYYCARGDSSSWYDYYYYMDVWGKGTTVTVSSGGGGSGGGGSGGGGSDIQMTQSPSSLSASVGDRVTITCQASQDISNYLNWYQQKPGKAPKLLIYAASSLQSGVPSRFSGSGSGTDFTLTISSLQPEDFATYYCQQSYRTPLTFGGGTKVEIKTTTPAPRPPTPAPTIASQPLSLRPEACRPAAGGAVHTRGLDFACDIYIWAPLAGTCGVLLLSLVITLYCRRDQRLPPDAHKPPGGGSFRTPIQEEQADAHSTLAKIRVKFSRSADAPAYQQGQNQLYNELNLGRREEYDVLDKRRGRDPEMGGKPRRKNPQEGLYNELQKDKMAEAYSEIGMKGERRRGKGHDGLYQGLSTATKDTYDALHMQALPPR

SEQ ID NO: 941 - protein, 498 aa, Artificial Sequence
  Synthetic
MALPVTALLLPLALLLHAARPDYKDDDDKGGGGSGGGGSQVQLVQSGAEVKKPGASVKVSCKASGYTFTDYFTHWVRQAPGQGLEWMGWINTYDGNTNYAQKFQGRVTMTRDTSTSTVYMELSSLRSEDTAVYYCAREMEWLGQVDYWGQGTLVTVSSGGGGSGGGGSGGGGSDIQMTQSPSSLSASVGDRVTITCRASQDIRNDLGWYQQKPGKAPKLLIYAASNLETGVPSRFSGSGSGTDFTLTISSLQPEDFATYYCQQSYSAPFTFGPGTKVDIKTTTPAPRPPTPAPTIASQPLSLRPEACRPAAGGAVHTRGLDFACDIYIWAPLAGTCGVLLLSLVITLYCRRDQRLPPDAHKPPGGGSFRTPIQEEQADAHSTLAKIRVKFSRSADAPAYQQGQNQLYNELNLGRREEYDVLDKRRGRDPEMGGKPRRKNPQEGLYNELQKDKMAEAYSEIGMKGERRRGKGHDGLYQGLSTATKDTYDALHMQALPPR

SEQ ID NO: 942 - protein, 498 aa, Artificial Sequence
  Synthetic
MALPVTALLLPLALLLHAARPDYKDDDDKGGGGSGGGGSQVQLVQSGAEVKKPGASVKVSCKASGYTFTSYYIHWVRQAPGQGLEWMGRINPNGGGTNYAQKFQGRVTMTRDTSTSTVYMELSSLRSEDTAVYYCARGHRGGGGIDYWGQGTLVTVSSGGGGSGGGGSGGGGSDIQMTQSPSSLSASVGDRVTITCRASQEISNYLAWYQQKPGKAPKLLIYDASNLQTGVPSRFSGSGSGTDFTLTISSLQPEDFATYYCQQSYSTPFTFGPGTKVDIKTTTPAPRPPTPAPTIASQPLSLRPEACRPAAGGAVHTRGLDFACDIYIWAPLAGTCGVLLLSLVITLYCRRDQRLPPDAHKPPGGGSFRTPIQEEQADAHSTLAKIRVKFSRSADAPAYQQGQNQLYNELNLGRREEYDVLDKRRGRDPEMGGKPRRKNPQEGLYNELQKDKMAEAYSEIGMKGERRRGKGHDGLYQGLSTATKDTYDALHMQALPPR

SEQ ID NO: 943 - protein, 498 aa, Artificial Sequence
  Synthetic
MALPVTALLLPLALLLHAARPDYKDDDDKGGGGSGGGGSQVQLVQSGAEVKKPGASVKVSCKASGGTFSSYAISWVRQAPGQGLEWMGWISPNSGDTHYAQKFQGRVTMTRDTSTSTVYMELSSLRSEDTAVYYCARDWGSGWYVDYWGQGTLVTVSSGGGGSGGGGSGGGGSDIQMTQSPSSLSASVGDRVTITCQASQDISDSLNWYQQKPGKAPKLLIYSASSLQSGVPSRFSGSGSGTDFTLTISSLQPEDFATYYCQQSFTTPYTFGQGTKVEIKTTTPAPRPPTPAPTIASQPLSLRPEACRPAAGGAVHTRGLDFACDIYIWAPLAGTCGVLLLSLVITLYCRRDQRLPPDAHKPPGGGSFRTPIQEEQADAHSTLAKIRVKFSRSADAPAYQQGQNQLYNELNLGRREEYDVLDKRRGRDPEMGGKPRRKNPQEGLYNELQKDKMAEAYSEIGMKGERRRGKGHDGLYQGLSTATKDTYDALHMQALPPR

SEQ ID NO: 944 - protein, 498 aa, Artificial Sequence
  Synthetic
MALPVTALLLPLALLLHAARPDYKDDDDKGGGGSGGGGSQVQLVQSGAEVKKPGSSVKVSCKASGGTFNSYGISWVRQAPGQGLEWMGGIIPIFGTANYAQKFQGRVTITADESTSTAYMELSSLRSEDTAVYYCARDTYGDDAFDIWGQGTMVTVSSGGGGSGGGGSGGGGSDIQMTQSPSSLSASVGDRVTITCRASQSISSWLAWYQQKPGKAPKLLIYDASNLETGVPSRFSGSGSGTDFTLTISSLQPEDFATYYCQQNFSPPLTFGQGTRLEIKTTTPAPRPPTPAPTIASQPLSLRPEACRPAAGGAVHTRGLDFACDIYIWAPLAGTCGVLLLSLVITLYCRRDQRLPPDAHKPPGGGSFRTPIQEEQADAHSTLAKIRVKFSRSADAPAYQQGQNQLYNELNLGRREEYDVLDKRRGRDPEMGGKPRRKNPQEGLYNELQKDKMAEAYSEIGMKGERRRGKGHDGLYQGLSTATKDTYDALHMQALPPR

SEQ ID NO: 945 - protein, 503 aa, Artificial Sequence
  Synthetic
MALPVTALLLPLALLLHAARPDYKDDDDKGGGGSGGGGSQVQLVQSGAEVKKPGASVKVSCKASGYSFTSYYMHWVRQAPGQGLEWMGIINPSGGTTSYAQKFQGRVTMTRDTSTSTVYMELSSLRSEDTAVYYCARDNSPYSSSWWDYFDYWGQGTLVTVSSGGGGSGGGGSGGGGSDIQMTQSPSSLSASVGDRVTITCRASQDIRHYLAWYQQKPGKAPKLLIYDASSLQSGVPSRFSGSGSGTDFTLTISSLQPEDFATYYCQQTYDAPITFGQGTRLEIKTTTPAPRPPTPAPTIASQPLSLRPEACRPAAGGAVHTRGLDFACDIYIWAPLAGTCGVLLLSLVITLYCRRDQRLPPDAHKPPGGGSFRTPIQEEQADAHSTLAKIRVKFSRSADAPAYQQGQNQLYNELNLGRREEYDVLDKRRGRDPEMGGKPRRKNPQEGLYNELQKDKMAEAYSEIGMKGERRRGKGHDGLYQGLSTATKDTYDALHMQALPPR

SEQ ID NO: 946 - protein, 501 aa, Artificial Sequence
  Synthetic
MALPVTALLLPLALLLHAARPDYKDDDDKGGGGSGGGGSQVQLVQSGAEVKKPGASVKVSCKASGYTFTDYYIHWVRQAPGQGLEWMGWITPNSGYTYYAQNFQGRVTMTRDTSTSTVYMELSSLRSEDTAVYYCARNTDCYGDFLGLDVWGQGTTVTVSSGGGGSGGGGSGGGGSDIVMTQSPDSLAVSLGERATINCRASSSISNYLAWYQQKPGQPPKLLIYGASTRASGVPDRFSGSGSGTDFTLTISSLQAEDVAVYYCQQSYSTPLTFGQGTKVEIKTTTPAPRPPTPAPTIASQPLSLRPEACRPAAGGAVHTRGLDFACDIYIWAPLAGTCGVLLLSLVITLYCRRDQRLPPDAHKPPGGGSFRTPIQEEQADAHSTLAKIRVKFSRSADAPAYQQGQNQLYNELNLGRREEYDVLDKRRGRDPEMGGKPRRKNPQEGLYNELQKDKMAEAYSEIGMKGERRRGKGHDGLYQGLSTATKDTYDALHMQALPPR

SEQ ID NO: 947 - protein, 501 aa, Artificial Sequence
  Synthetic
MALPVTALLLPLALLLHAARPDYKDDDDKGGGGSGGGGSQVQLVQSGAEVKKPGASVKVSCKASGYTFNGYLMHWVRQAPGQGLEWMGIVNPSDGSTGYAQKFQGRVTMTRDTSTSTVYMELSSLRSEDTAVYYCAKDTGLRYFDWLLDYWGQGTLVTVSSGGGGSGGGGSGGGGSDIQMTQSPSSLSASVGDRVTITCRASQGITNFLAWYQQKPGKAPKLLIYDASNLETGVPSRFSGSGSGTDFTLTISSLQPEDFATYYCQQSYGAPLTFGQGTRLEIKTTTPAPRPPTPAPTIASQPLSLRPEACRPAAGGAVHTRGLDFACDIYIWAPLAGTCGVLLLSLVITLYCRRDQRLPPDAHKPPGGGSFRTPIQEEQADAHSTLAKIRVKFSRSADAPAYQQGQNQLYNELNLGRREEYDVLDKRRGRDPEMGGKPRRKNPQEGLYNELQKDKMAEAYSEIGMKGERRRGKGHDGLYQGLSTATKDTYDALHMQALPPR

SEQ ID NO: 948 - protein, 497 aa, Artificial Sequence
  Synthetic
MALPVTALLLPLALLLHAARPDYKDDDDKGGGGSGGGGSQVQLVQSGAEVKKPGASVKVSCKASGYTFTSYYMHWVRQAPGQGLEWMGIIDPSGGRTIYAQRFQGRVTMTRDTSTSTVYMELSSLRSEDTAVYYCARHEAGGIFDYWGQGTLVTVSSGGGGSGGGGSGGGGSDIQMTQSPSSLSASVGDRVTITCQASQDISNYLNWYQQKPGKAPKLLIYSASTLQSGVPSRFSGSGSGTDFTLTISSLQPEDFATYYCQQSYSSPYRFGQGTKVEIKTTTPAPRPPTPAPTIASQPLSLRPEACRPAAGGAVHTRGLDFACDIYIWAPLAGTCGVLLLSLVITLYCRRDQRLPPDAHKPPGGGSFRTPIQEEQADAHSTLAKIRVKFSRSADAPAYQQGQNQLYNELNLGRREEYDVLDKRRGRDPEMGGKPRRKNPQEGLYNELQKDKMAEAYSEIGMKGERRRGKGHDGLYQGLSTATKDTYDALHMQALPPR

SEQ ID NO: 949 - protein, 505 aa, Artificial Sequence
  Synthetic
MALPVTALLLPLALLLHAARPDYKDDDDKGGGGSGGGGSQVQLVQSGAEVKKPGSSVKVSCKASGYTFSDSYMHWVRQAPGQGLEWVGGIIPMAGIPAYAEEFQGRVTITADESTSTAYMELSSLRSEDTAVYYCARADDYGGNWYFDLWGRGTLVTVSSGGGGSGGGGSGGGGSDIVMTQSPLSLPVTPGEPASISCRSSQSLLHSNGYNYLDWYLQKPGQSPQLLIYAASSLQSGVPDRFSGSGSGTDFTLKISRVEAEDVGVYYCMQGAHWPPTFGQGTKLEIKTTTPAPRPPTPAPTIASQPLSLRPEACRPAAGGAVHTRGLDFACDIYIWAPLAGTCGVLLLSLVITLYCRRDQRLPPDAHKPPGGGSFRTPIQEEQADAHSTLAKIRVKFSRSADAPAYQQGQNQLYNELNLGRREEYDVLDKRRGRDPEMGGKPRRKNPQEGLYNELQKDKMAEAYSEIGMKGERRRGKGHDGLYQGLSTATKDTYDALHMQALPPR

SEQ ID NO: 950 - protein, 499 aa, Artificial Sequence
  Synthetic
MALPVTALLLPLALLLHAARPDYKDDDDKGGGGSGGGGSQVQLVQSGAEVKKPGASVKVSCKASGYIFTDYYMHWVRQAPGQGLEWMGIINPSGGSTSYAQKFQGRVTMTRDTSTSTVYMELSSLRSEDTAVYYCARDSGWYESWFDPWGQGTLVTVSSGGGGSGGGGSGGGGSDIQMTQSPSSLSASVGDRVTITCRASQDIRDGLGWYQQKPGKAPKLLIYAASTLQSGVPSRFSGSGSGTDFTLTISSLQPEDFATYYCQQSYGTPPTFGQGTKVEIKTTTPAPRPPTPAPTIASQPLSLRPEACRPAAGGAVHTRGLDFACDIYIWAPLAGTCGVLLLSLVITLYCRRDQRLPPDAHKPPGGGSFRTPIQEEQADAHSTLAKIRVKFSRSADAPAYQQGQNQLYNELNLGRREEYDVLDKRRGRDPEMGGKPRRKNPQEGLYNELQKDKMAEAYSEIGMKGERRRGKGHDGLYQGLSTATKDTYDALHMQALPPR

SEQ ID NO: 951 - protein, 500 aa, Artificial Sequence
  Synthetic
MALPVTALLLPLALLLHAARPDYKDDDDKGGGGSGGGGSQVQLVQSGAEVKKPGASVKVSCKASGYTFTDYYLHWVRQAPGQGLEWMGWISAYNGNTNYAQKFQGRVTMTRDTSTSTVYMELSSLRSEDTAVYYCAREIVGATEDWYFDLWGRGTLVTVSSGGGGSGGGGSGGGGSEIVMTQSPATLSVSPGERATLSCRASQSVSSYLAWYQQKPGQAPRLLIYGASTRATGIPARFSGSGSGTEFTLTISSLQSEDFAVYYCQQYDSSPTFGQGTKVEIKTTTPAPRPPTPAPTIASQPLSLRPEACRPAAGGAVHTRGLDFACDIYIWAPLAGTCGVLLLSLVITLYCRRDQRLPPDAHKPPGGGSFRTPIQEEQADAHSTLAKIRVKFSRSADAPAYQQGQNQLYNELNLGRREEYDVLDKRRGRDPEMGGKPRRKNPQEGLYNELQKDKMAEAYSEIGMKGERRRGKGHDGLYQGLSTATKDTYDALHMQALPPR

SEQ ID NO: 952 - protein, 498 aa, Artificial Sequence
  Synthetic
MALPVTALLLPLALLLHAARPDYKDDDDKGGGGSGGGGSQVQLVQSGAEVKKPGASVKVSCKASGYTFTAYYLHWVRQAPGQGLEWMGMINPNNGGTIYAQTFQGRVTMTRDTSTSTVYMELSSLRSEDTAVYYCARDLGGYVLFDYWGQGTLVTVSSGGGGSGGGGSGGGGSDIQMTQSPSSLSASVGDRVTITCRASQSISSYLNWYQQKPGKAPKLLIYDASNLETGVPSRFSGSGSGTDFTLTISSLQPEDFATYYCQQSHSAPITFGQGTRLEIKTTTPAPRPPTPAPTIASQPLSLRPEACRPAAGGAVHTRGLDFACDIYIWAPLAGTCGVLLLSLVITLYCRRDQRLPPDAHKPPGGGSFRTPIQEEQADAHSTLAKIRVKFSRSADAPAYQQGQNQLYNELNLGRREEYDVLDKRRGRDPEMGGKPRRKNPQEGLYNELQKDKMAEAYSEIGMKGERRRGKGHDGLYQGLSTATKDTYDALHMQALPPR

SEQ ID NO: 953 - protein, 498 aa, Artificial Sequence
  Synthetic
MALPVTALLLPLALLLHAARPDYKDDDDKGGGGSGGGGSQVQLVQSGAEVKKPGASVKVSCKASGYTFTDYYIHWVRQAPGQGLEWMGMINPRGGSTTYAQSFQGRVTMTRDTSTSTVYMELSSLRSEDTAVYYCARDLGDYGDYDYWGQGTLVTVSSGGGGSGGGGSGGGGSDIQMTQSPSSLSASVGDRVTITCRASQSISTNLAWYQQKPGKAPKLLIYDASYLEAGVPSRFSGSGSGTDFTLTISSLQPEDFATYYCQQSYSTPPTFGQGTKLEIKTTTPAPRPPTPAPTIASQPLSLRPEACRPAAGGAVHTRGLDFACDIYIWAPLAGTCGVLLLSLVITLYCRRDQRLPPDAHKPPGGGSFRTPIQEEQADAHSTLAKIRVKFSRSADAPAYQQGQNQLYNELNLGRREEYDVLDKRRGRDPEMGGKPRRKNPQEGLYNELQKDKMAEAYSEIGMKGERRRGKGHDGLYQGLSTATKDTYDALHMQALPPR

SEQ ID NO: 954 - protein, 509 aa, Artificial Sequence
  Synthetic
MALPVTALLLPLALLLHAARPDYKDDDDKGGGGSGGGGSEVQLLESGGGLVQPGGSLRLSCAASGFTFSNSDMNWVRQAPGKGLEWVSAISGGGDTLYYADSVKGRFTISRDNSKNTLYLQMNSLRAEDTAVYYCAMASALDSSGDNEAFDIWGQGTTVTVSSGGGGSGGGGSGGGGSDIVMTQSPDSLAVSLGERATINCKSSQSVLYSSNNKNYLAWYQQKPGQPPKLLIYWASTRDSGVPDRFSGSGSGTDFTLTISSLQAEDVAVYYCQQYYGFPPTFGQGTRLEIKTTTPAPRPPTPAPTIASQPLSLRPEACRPAAGGAVHTRGLDFACDIYIWAPLAGTCGVLLLSLVITLYCRRDQRLPPDAHKPPGGGSFRTPIQEEQADAHSTLAKIRVKFSRSADAPAYQQGQNQLYNELNLGRREEYDVLDKRRGRDPEMGGKPRRKNPQEGLYNELQKDKMAEAYSEIGMKGERRRGKGHDGLYQGLSTATKDTYDALHMQALPPR

SEQ ID NO: 955 - protein, 501 aa, Artificial Sequence
  Synthetic
MALPVTALLLPLALLLHAARPDYKDDDDKGGGGSGGGGSQVQLVQSGAEVKKPGASVKVSCKASGYTFTSYYMHWVRQAPGQGLEWMGWINPNNGGTSYAQKFQGRVTMTRDTSTSTVYMELSSLRSEDTAVYYCARVEDDFWSGPSFDYWGQGTLVTVSSGGGGSGGGGSGGGGSDIQMTQSPSSLSASVGDRVTITCQASHDISKFLNWYQQKPGKAPKLLIYDASNLQRGVPSRFSGSGSGTDFTLTISSLQPEDFATYYCQQTYSFPFTFGQGTKLEIKTTTPAPRPPTPAPTIASQPLSLRPEACRPAAGGAVHTRGLDFACDIYIWAPLAGTCGVLLLSLVITLYCRRDQRLPPDAHKPPGGGSFRTPIQEEQADAHSTLAKIRVKFSRSADAPAYQQGQNQLYNELNLGRREEYDVLDKRRGRDPEMGGKPRRKNPQEGLYNELQKDKMAEAYSEIGMKGERRRGKGHDGLYQGLSTATKDTYDALHMQALPPR

SEQ ID NO: 956 - protein, 503 aa, Artificial Sequence
  Synthetic
MALPVTALLLPLALLLHAARPDYKDDDDKGGGGSGGGGSQVQLVQSGAEVKKPGSSVKVSCKASGGTFTNYAFSWVRQAPGQGLEWMGGIIPISGAANYAQKFQGRVTITADESTSTAYMELSSLRSEDTAVYYCARGSGLDDAFDIWGQGTMVTVSSGGGGSGGGGSGGGGSDIVMTQSPLSLPVTPGEPASISCRSSQSLLHSNGYNYLDWYLQKPGQSPQLLIYDASSLQSGVPDRFSGSGSGTDFTLKISRVEAEDVGVYYCMQARQTPLTFGQGTRLEIKTTTPAPRPPTPAPTIASQPLSLRPEACRPAAGGAVHTRGLDFACDIYIWAPLAGTCGVLLLSLVITLYCRRDQRLPPDAHKPPGGGSFRTPIQEEQADAHSTLAKIRVKFSRSADAPAYQQGQNQLYNELNLGRREEYDVLDKRRGRDPEMGGKPRRKNPQEGLYNELQKDKMAEAYSEIGMKGERRRGKGHDGLYQGLSTATKDTYDALHMQALPPR

SEQ ID NO: 957 - protein, 513 aa, Artificial Sequence
  Synthetic
MALPVTALLLPLALLLHAARPDYKDDDDKGGGGSGGGGSQVQLVQSGAEVKKPGASVKVSCKASGYTFTAYYMHWVRQAPGQGLEWMGWMNPNSGNTGYAQKFQGRVTMTRDTSTSTVYMELSSLRSEDTAVYYCAREGRIDYGDYDDYYYYYGMDVWGQGTTVTVSSGGGGSGGGGSGGGGSDIVMTQSPLSLPVTPGEPASISCRSSQSLLHSNGYNYLDWYLQKPGQSPQLLIYAASNLQGGVPDRFSGSGSGTDFTLKISRVEAEDVGVYYCMQTLESPVTFGGGTKVEIKTTTPAPRPPTPAPTIASQPLSLRPEACRPAAGGAVHTRGLDFACDIYIWAPLAGTCGVLLLSLVITLYCRRDQRLPPDAHKPPGGGSFRTPIQEEQADAHSTLAKIRVKFSRSADAPAYQQGQNQLYNELNLGRREEYDVLDKRRGRDPEMGGKPRRKNPQEGLYNELQKDKMAEAYSEIGMKGERRRGKGHDGLYQGLSTATKDTYDALHMQALPPR

SEQ ID NO: 958 - protein, 499 aa, Artificial Sequence
  Synthetic
MALPVTALLLPLALLLHAARPDYKDDDDKGGGGSGGGGSQVQLVQSGAEVKKPGASVKVSCKASGYTFTDYYVHWVRQAPGQGLEWMGTINPSGGSTSYAQKFQGRVTMTRDTSTSTVYMELSSLRSEDTAVYYCARDQGLWFTGFDYWGQGTLVTVSSGGGGSGGGGSGGGGSDIQMTQSPSSLSASVGDRVTITCRASQGISNNLNWYQQKPGKAPKLLIYDASNLERGVPSRFSGSGSGTDFTLTISSLQPEDFATYYCQQSYDGPITFGQGTRLEIKTTTPAPRPPTPAPTIASQPLSLRPEACRPAAGGAVHTRGLDFACDIYIWAPLAGTCGVLLLSLVITLYCRRDQRLPPDAHKPPGGGSFRTPIQEEQADAHSTLAKIRVKFSRSADAPAYQQGQNQLYNELNLGRREEYDVLDKRRGRDPEMGGKPRRKNPQEGLYNELQKDKMAEAYSEIGMKGERRRGKGHDGLYQGLSTATKDTYDALHMQALPPR

SEQ ID NO: 959 - protein, 499 aa, Artificial Sequence
  Synthetic
MALPVTALLLPLALLLHAARPDYKDDDDKGGGGSGGGGSQVQLVQSGAEVKKPGASVKVSCKASGYTFTAYHMHWVRQAPGQGLEWMGIINPGDGATGYAQNLQGRVTMTRDTSTSTVYMELSSLRSEDTAVYYCAGEGISGSDAFDIWGQGTLVTVSSGGGGSGGGGSGGGGSDIQMTQSPSSLSASVGDRVTITCRASQSISSWLAWYQQKPGKAPKLLIYAASSLQSGVPSRFSGSGSGTDFTLTISSLQPEDFATYYCLQDYSYPLTFGGGTKVEIKTTTPAPRPPTPAPTIASQPLSLRPEACRPAAGGAVHTRGLDFACDIYIWAPLAGTCGVLLLSLVITLYCRRDQRLPPDAHKPPGGGSFRTPIQEEQADAHSTLAKIRVKFSRSADAPAYQQGQNQLYNELNLGRREEYDVLDKRRGRDPEMGGKPRRKNPQEGLYNELQKDKMAEAYSEIGMKGERRRGKGHDGLYQGLSTATKDTYDALHMQALPPR

SEQ ID NO: 960 - protein, 497 aa, Artificial Sequence
  Synthetic
MALPVTALLLPLALLLHAARPDYKDDDDKGGGGSGGGGSQVQLVQSGAEVKKPGSSVKVSCKASGGTFSSYAISWVRQAPGQGLEWMGWMNPNSGNTGYAQKFQGRVTITADESTSTAYMELSSLRSEDTAVYYCAWGVDPYYFDYWGQGTLVTVSSGGGGSGGGGSGGGGSDIQMTQSPSSLSASVGDRVTITCRASQSINRWLAWYQQKPGKAPKLLIYDASNLETGVPSRFSGSGSGTDFTLTISSLQPEDFATYYCQQSYITPLTFGGGTKVEIKTTTPAPRPPTPAPTIASQPLSLRPEACRPAAGGAVHTRGLDFACDIYIWAPLAGTCGVLLLSLVITLYCRRDQRLPPDAHKPPGGGSFRTPIQEEQADAHSTLAKIRVKFSRSADAPAYQQGQNQLYNELNLGRREEYDVLDKRRGRDPEMGGKPRRKNPQEGLYNELQKDKMAEAYSEIGMKGERRRGKGHDGLYQGLSTATKDTYDALHMQALPPR

SEQ ID NO: 961 - protein, 497 aa, Artificial Sequence
  Synthetic
MALPVTALLLPLALLLHAARPDYKDDDDKGGGGSGGGGSQVQLVQSGAEVKKPGASVKVSCKASGYTFTSYYMHWVRQAPGQGLEWMGIFNPSDGSTSYAQKFQGRVTMTRDTSTSTVYMELSSLRSEDTAVYYCARDVGETTFDPWGQGTLVTVSSGGGGSGGGGSGGGGSDIQMTQSPSSLSASVGDRVTITCQASQDISNYLNWYQQKPGKAPKLLIYDASSLESGVPSRFSGSGSGTDFTLTISSLQPEDFATYYCQQTNSFPITFGQGTRLEIKTTTPAPRPPTPAPTIASQPLSLRPEACRPAAGGAVHTRGLDFACDIYIWAPLAGTCGVLLLSLVITLYCRRDQRLPPDAHKPPGGGSFRTPIQEEQADAHSTLAKIRVKFSRSADAPAYQQGQNQLYNELNLGRREEYDVLDKRRGRDPEMGGKPRRKNPQEGLYNELQKDKMAEAYSEIGMKGERRRGKGHDGLYQGLSTATKDTYDALHMQALPPR

SEQ ID NO: 962 - protein, 502 aa, Artificial Sequence
  Synthetic
MALPVTALLLPLALLLHAARPDYKDDDDKGGGGSGGGGSQVQLVQSGAEVKKPGASVKVSCKASGYTFTSYGISWVRQAPGQGLEWMGWISAYNGHTNYAQKFQGRVTMTRDTSTSTVYMELSSLRSEDTAVYYCARDSVRGWDYYYGMGVWGQGTTVTVSSGGGGSGGGGSGGGGSDIQMTQSPSSLSASVGDRVTITCQASQDIRNFLNWYQQKPGKAPKLLIYAASTLQSGVPSRFSGSGSGTDFTLTISSLQPEDFATYYCQQSYSAPSTFGQGTKLEIKTTTPAPRPPTPAPTIASQPLSLRPEACRPAAGGAVHTRGLDFACDIYIWAPLAGTCGVLLLSLVITLYCRRDQRLPPDAHKPPGGGSFRTPIQEEQADAHSTLAKIRVKFSRSADAPAYQQGQNQLYNELNLGRREEYDVLDKRRGRDPEMGGKPRRKNPQEGLYNELQKDKMAEAYSEIGMKGERRRGKGHDGLYQGLSTATKDTYDALHMQALPPR

SEQ ID NO: 963 - protein, 499 aa, Artificial Sequence
  Synthetic
MALPVTALLLPLALLLHAARPDYKDDDDKGGGGSGGGGSQVQLVQSGAEVKKPGSSVKVSCKASGYTFIDYYMHWVRQAPGQGLEWMGWMNPHSGNSDNAPKFQGRVTITADESTSTAYMELSSLRSEDTAVYYCARGYSGYDLTADYWGQGTLVTVSSGGGGSGGGGSGGGGSDIQMTQSPSSLSASVGDRVTITCRASQSISNYLNWYQQKPGKAPKLLIYDASNLETGVPSRFSGSGSGTDFTLTISSLQPEDFATYYCQQSYSTPITFGQGTRLEIKTTTPAPRPPTPAPTIASQPLSLRPEACRPAAGGAVHTRGLDFACDIYIWAPLAGTCGVLLLSLVITLYCRRDQRLPPDAHKPPGGGSFRTPIQEEQADAHSTLAKIRVKFSRSADAPAYQQGQNQLYNELNLGRREEYDVLDKRRGRDPEMGGKPRRKNPQEGLYNELQKDKMAEAYSEIGMKGERRRGKGHDGLYQGLSTATKDTYDALHMQALPPR

SEQ ID NO: 964 - protein, 508 aa, Artificial Sequence
  Synthetic
MALPVTALLLPLALLLHAARPDYKDDDDKGGGGSGGGGSQVQLVQSGAEVKKPGASVKVSCKASGYTFTGQYMHWVRQAPGQGLEWMGWINPNTGDTNYAQKFQGRVTMTRDTSTSTVYMELSSLRSEDTAVYYCARDSVFEVEGGTDYYYYYGMDVWGQGTMVTVSSGGGGSGGGGSGGGGSDIQMTQSPSSLSASVGDRVTITCRASETISGWLAWYQQKPGKAPKLLIYDASNLETGVPSRFSGSGSGTDFTLTISSLQPEDFATYYCQQSYSTPWTFGQGTKLEIKTTTPAPRPPTPAPTIASQPLSLRPEACRPAAGGAVHTRGLDFACDIYIWAPLAGTCGVLLLSLVITLYCRRDQRLPPDAHKPPGGGSFRTPIQEEQADAHSTLAKIRVKFSRSADAPAYQQGQNQLYNELNLGRREEYDVLDKRRGRDPEMGGKPRRKNPQEGLYNELQKDKMAEAYSEIGMKGERRRGKGHDGLYQGLSTATKDTYDALHMQALPPR

SEQ ID NO: 965 - protein, 498 aa, Artificial Sequence
  Synthetic
MALPVTALLLPLALLLHAARPDYKDDDDKGGGGSGGGGSQVQLVQSGAEVKKPGASVKVSCKASGYTFTSYDINWVRQAPGQGLEWMGVINPSGGGTSYAQKFQGRVTMTRDTSTSTVYMELSSLRSEDTAVYYCARYSGYDWVFDYWGQGTLVTVSSGGGGSGGGGSGGGGSDIQMTQSPSSLSASVGDRVTITCRASQGIGSWLAWYQQKPGKAPKLLIYAASTLQSGVPSRFSGSGSGTDFTLTISSLQPEDFATYYCQQSYSTPWTFGPGTKVDIKTTTPAPRPPTPAPTIASQPLSLRPEACRPAAGGAVHTRGLDFACDIYIWAPLAGTCGVLLLSLVITLYCRRDQRLPPDAHKPPGGGSFRTPIQEEQADAHSTLAKIRVKFSRSADAPAYQQGQNQLYNELNLGRREEYDVLDKRRGRDPEMGGKPRRKNPQEGLYNELQKDKMAEAYSEIGMKGERRRGKGHDGLYQGLSTATKDTYDALHMQALPPR

SEQ ID NO: 966 - protein, 499 aa, Artificial Sequence
  Synthetic
MALPVTALLLPLALLLHAARPDYKDDDDKGGGGSGGGGSQVQLVQSGAEVKKPGASVKVSCKASGYTFANYYMHWVRQAPGQGLEWMGIINPSGGSTSYAQKFQGRVTMTRDTSTSTVYMELSSLRSEDTAVYYCARDSGSYFGWFDPWGQGTLVTVSSGGGGSGGGGSGGGGSDIQMTQSPSSLSASVGDRVTITCRASQSISSSLAWYQQKPGKAPKLLIYDASSLQSGVPSRFSGSGSGTDFTLTISSLQPEDFATYYCQQSYNTPPTFGGGTKLEIKTTTPAPRPPTPAPTIASQPLSLRPEACRPAAGGAVHTRGLDFACDIYIWAPLAGTCGVLLLSLVITLYCRRDQRLPPDAHKPPGGGSFRTPIQEEQADAHSTLAKIRVKFSRSADAPAYQQGQNQLYNELNLGRREEYDVLDKRRGRDPEMGGKPRRKNPQEGLYNELQKDKMAEAYSEIGMKGERRRGKGHDGLYQGLSTATKDTYDALHMQALPPR

SEQ ID NO: 967 - protein, 499 aa, Artificial Sequence
  Synthetic
MALPVTALLLPLALLLHAARPDYKDDDDKGGGGSGGGGSQVQLVQSGAEVKKPGASVKVSCKASGYTFTTYYMHWVRQAPGQGLEWMGIINPTGGSTYYAQKFQGRVTMTRDTSTSTVYMELSSLRSEDTAVYYCARDSGNYQGIFDYWGQGTLVTVSSGGGGSGGGGSGGGGSDIQMTQSPSSLSASVGDRVTITCRASQGIGGYLAWYQQKPGKAPKLLIYDASNLETGVPSRFSGSGSGTDFTLTISSLQPEDFATYYCQQSYDSPPTFGQGTRLEIKTTTPAPRPPTPAPTIASQPLSLRPEACRPAAGGAVHTRGLDFACDIYIWAPLAGTCGVLLLSLVITLYCRRDQRLPPDAHKPPGGGSFRTPIQEEQADAHSTLAKIRVKFSRSADAPAYQQGQNQLYNELNLGRREEYDVLDKRRGRDPEMGGKPRRKNPQEGLYNELQKDKMAEAYSEIGMKGERRRGKGHDGLYQGLSTATKDTYDALHMQALPPR

SEQ ID NO: 968 - protein, 498 aa, Artificial Sequence
  Synthetic
MALPVTALLLPLALLLHAARPDYKDDDDKGGGGSGGGGSQVQLVQSGAEVKKPGASVKVSCKASGNTFTSYYMHWVRQAPGQGLEWMGWINPNSGDTNYAQNFQGRVTMTRDTSTSTVYMELSSLRSEDTAVYYCARGVSGYDLFDYWGQGTLVTVSSGGGGSGGGGSGGGGSDIQMTQSPSSLSASVGDRVTITCRASQSVSSYLNWYQQKPGKAPKLLIYDTSNLETGVPSRFSGSGSGTDFTLTISSLQPEDFATYYCQQAHSFPLTFGGGTKVEIKTTTPAPRPPTPAPTIASQPLSLRPEACRPAAGGAVHTRGLDFACDIYIWAPLAGTCGVLLLSLVITLYCRRDQRLPPDAHKPPGGGSFRTPIQEEQADAHSTLAKIRVKFSRSADAPAYQQGQNQLYNELNLGRREEYDVLDKRRGRDPEMGGKPRRKNPQEGLYNELQKDKMAEAYSEIGMKGERRRGKGHDGLYQGLSTATKDTYDALHMQALPPR

SEQ ID NO: 969 - protein, 498 aa, Artificial Sequence
  Synthetic
MALPVTALLLPLALLLHAARPDYKDDDDKGGGGSGGGGSEVQLVESGGGLVKPGGSLRLSCAASGFTFSSYGMHWVRQAPGKGLEWVASIKHDGSEQYYVDSVKGRFTISRDDSKNTLYLQMNSLKTEDTAVYYCAASGVDVWGQGTTVTVSSGGGGSGGGGSGGGGSDIVMTQSPLSLPVTPGEPASISCRSSQSLLHSNGYNYLDWYLQKPGQSPQLLIYLGSTRASGVPDRFSGSGSGTDFTLKISRVEAEDVGVYYCMQALDTPLTFGGGTKLEIKTTTPAPRPPTPAPTIASQPLSLRPEACRPAAGGAVHTRGLDFACDIYIWAPLAGTCGVLLLSLVITLYCRRDQRLPPDAHKPPGGGSFRTPIQEEQADAHSTLAKIRVKFSRSADAPAYQQGQNQLYNELNLGRREEYDVLDKRRGRDPEMGGKPRRKNPQEGLYNELQKDKMAEAYSEIGMKGERRRGKGHDGLYQGLSTATKDTYDALHMQALPPR

SEQ ID NO: 970 - protein, 501 aa, Artificial Sequence
  Synthetic
MALPVTALLLPLALLLHAARPDYKDDDDKGGGGSGGGGSQVQLVQSGAEVKKPGASVKVSCKASGGTFSRYDINWVRQAPGQGLEWVGIIDPTGASTSYAQKFQGRVTMTRDTSTSTVYMELSSLRSEDTAVYYCARDYSYGMDYYGMDVWGQGTLVTVSSGGGGSGGGGSGGGGSDIQMTQSPSSLSASVGDRVTITCQASQDISNYLNWYQQKPGKAPKLLIYDTSNLQTGVPSRFSGSGSGTDFTLTISSLQPEDFATYYLSTDLQTTAHFGQGTKVEIKTTTPAPRPPTPAPTIASQPLSLRPEACRPAAGGAVHTRGLDFACDIYIWAPLAGTCGVLLLSLVITLYCRRDQRLPPDAHKPPGGGSFRTPIQEEQADAHSTLAKIRVKFSRSADAPAYQQGQNQLYNELNLGRREEYDVLDKRRGRDPEMGGKPRRKNPQEGLYNELQKDKMAEAYSEIGMKGERRRGKGHDGLYQGLSTATKDTYDALHMQALPPR

SEQ ID NO: 971 - protein, 503 aa, Artificial Sequence
  Synthetic
MALPVTALLLPLALLLHAARPDYKDDDDKGGGGSGGGGSQVQLVQSGAEVKKPGSSVKVSCKASGYTFTSYGISWVRQAPGQGLEWMGGIIPIFGTTNYAQKFQGRVTITADESTSTAYMELSSLRSEDTAVYYCARDHSGDGYFDLWGRGTLVTVSSGGGGSGGGGSGGGGSDIVMTQSPLSLPVTPGEPASISCRSSQSLLHSNGYNYLDWYLQKPGQSPQLLIYDASSLQSGVPDRFSGSGSGTDFTLKISRVEAEDVGVYYCMQGTHWPPTFGQGTKVEIKTTTPAPRPPTPAPTIASQPLSLRPEACRPAAGGAVHTRGLDFACDIYIWAPLAGTCGVLLLSLVITLYCRRDQRLPPDAHKPPGGGSFRTPIQEEQADAHSTLAKIRVKFSRSADAPAYQQGQNQLYNELNLGRREEYDVLDKRRGRDPEMGGKPRRKNPQEGLYNELQKDKMAEAYSEIGMKGERRRGKGHDGLYQGLSTATKDTYDALHMQALPPR

SEQ ID NO: 972 - protein, 497 aa, Artificial Sequence
  Synthetic
MALPVTALLLPLALLLHAARPDYKDDDDKGGGGSGGGGSQVQLVQSGAEVKKPGASVKVSCKASGYTFTENEMHWVRQAPGQGLEWMGWINPNSGGTNYAQKFQGRVTMTRDTSTSTVYMELSSLRSEDTAVYYCAGSWGGYYFDYWGQGTLVTVSSGGGGSGGGGSGGGGSDIQMTQSPSSLSASVGDRVTITCRASQSVSRYLNWYQQKPGKAPKLLIYDASNLETGVPSRFSGSGSGTDFTLTISSLQPEDFATYYCQQADSFPVTFGQGTKLEIKTTTPAPRPPTPAPTIASQPLSLRPEACRPAAGGAVHTRGLDFACDIYIWAPLAGTCGVLLLSLVITLYCRRDQRLPPDAHKPPGGGSFRTPIQEEQADAHSTLAKIRVKFSRSADAPAYQQGQNQLYNELNLGRREEYDVLDKRRGRDPEMGGKPRRKNPQEGLYNELQKDKMAEAYSEIGMKGERRRGKGHDGLYQGLSTATKDTYDALHMQALPPR

SEQ ID NO: 973 - protein, 500 aa, Artificial Sequence
  Synthetic
MALPVTALLLPLALLLHAARPDYKDDDDKGGGGSGGGGSQVQLVQSGAEVKKPGASVKVSCKASGYTFTNYYIYWVRQAPGQGLEWMGWINPNDGATNYAQKFQGRVTMTRDTSTSTVYMELSSLRSEDTAVYYCAREGNDYYYYFMDYWGQGTLVTVSSGGGGSGGGGSGGGGSDIQMTQSPSSLSASVGDRVTITCRASQGISNNLNWYQQKPGKAPKLLIYHASNLETGVPSRFSGSGSGTDFTLTISSLQPEDFATYYCQQSYDGPMTFGQGTKLEIKTTTPAPRPPTPAPTIASQPLSLRPEACRPAAGGAVHTRGLDFACDIYIWAPLAGTCGVLLLSLVITLYCRRDQRLPPDAHKPPGGGSFRTPIQEEQADAHSTLAKIRVKFSRSADAPAYQQGQNQLYNELNLGRREEYDVLDKRRGRDPEMGGKPRRKNPQEGLYNELQKDKMAEAYSEIGMKGERRRGKGHDGLYQGLSTATKDTYDALHMQALPPR

SEQ ID NO: 974 - protein, 506 aa, Artificial Sequence
  Synthetic
MALPVTALLLPLALLLHAARPDYKDDDDKGGGGSGGGGSQVQLVQSGAEVKKPGSSVKVSCKASGGTFSSYAISWVRQAPGQGLEWMGGITPMFGTTDYAQKFQGRVTITADESTSTAYMELSSLRSEDTAVYYCARDERDGYATVAFDIWGQGTMVTVSSGGGGSGGGGSGGGGSDIVMTQSPLSLPVTPGEPASISCRSSQSLLHSNGYNYLDWYLQKPGQSPQLLIYDASNLETGVPDRFSGSGSGTDFTLKISRVEAEDVGVYYCMQGTHWPPTFGQGTKVEIKTTTPAPRPPTPAPTIASQPLSLRPEACRPAAGGAVHTRGLDFACDIYIWAPLAGTCGVLLLSLVITLYCRRDQRLPPDAHKPPGGGSFRTPIQEEQADAHSTLAKIRVKFSRSADAPAYQQGQNQLYNELNLGRREEYDVLDKRRGRDPEMGGKPRRKNPQEGLYNELQKDKMAEAYSEIGMKGERRRGKGHDGLYQGLSTATKDTYDALHMQALPPR

SEQ ID NO: 975 - protein, 501 aa, Artificial Sequence
  Synthetic
MALPVTALLLPLALLLHAARPDYKDDDDKGGGGSGGGGSQVQLVQSGAEVKKPGASVKVSCKASGYTFTSYYMHWVRQAPGQGLEWMGIINPSDGGTSYADKFQGRVTMTRDTSTSTVYMELSSLRSEDTAVYYCARALAPLGWGDGMDVWGQGTTVTVSSGGGGSGGGGSGGGGSDIQMTQSPSSLSASVGDRVTITCQASQDISNYLNWYQQKPGKAPKLLIYDASNLETGVPSRFSGSGSGTDFTLTISSLQPEDFATYYCQQSYDGPITFGQGTRLEIKTTTPAPRPPTPAPTIASQPLSLRPEACRPAAGGAVHTRGLDFACDIYIWAPLAGTCGVLLLSLVITLYCRRDQRLPPDAHKPPGGGSFRTPIQEEQADAHSTLAKIRVKFSRSADAPAYQQGQNQLYNELNLGRREEYDVLDKRRGRDPEMGGKPRRKNPQEGLYNELQKDKMAEAYSEIGMKGERRRGKGHDGLYQGLSTATKDTYDALHMQALPPR

SEQ ID NO: 976 - protein, 498 aa, Artificial Sequence
  Synthetic
MALPVTALLLPLALLLHAARPDYKDDDDKGGGGSGGGGSQVQLVQSGAEVKKPGSSVKVSCKASGYTFTSYYIHWVRQAPGQGLEWMGWMNPSSGVTNFAQKFQGRVTITADESTSTAYMELSSLRSEDTAVYYCARGSDQGDWSDPWGQGTLVTVSSGGGGSGGGGSGGGGSDIQMTQSPSSLSASVGDRVTITCRASQSISSYLNWYQQKPGKAPKLLIYDASNLETGVPSRFSGSGSGTDFTLTISSLQPEDFATYYCQQSYNTPPTFGGGTKVEIKTTTPAPRPPTPAPTIASQPLSLRPEACRPAAGGAVHTRGLDFACDIYIWAPLAGTCGVLLLSLVITLYCRRDQRLPPDAHKPPGGGSFRTPIQEEQADAHSTLAKIRVKFSRSADAPAYQQGQNQLYNELNLGRREEYDVLDKRRGRDPEMGGKPRRKNPQEGLYNELQKDKMAEAYSEIGMKGERRRGKGHDGLYQGLSTATKDTYDALHMQALPPR

SEQ ID NO: 977 - protein, 501 aa, Artificial Sequence
  Synthetic
MALPVTALLLPLALLLHAARPDYKDDDDKGGGGSGGGGSQVQLVQSGAEVKKPGASVKVSCKASGYTFTDSYIHWVRQAPGQGLEWIGWMNPNTGDTGYAQKFQGRVTMTRDTSTSTVYMELSSLRSEDTAVYYCAKDDFGELAPATFDPWGQGTLVTVSSGGGGSGGGGSGGGGSDIQMTQSPSSLSASVGDRVTITCQASQDISNYLNWYQQKPGKAPKLLIYGASSLQSGVPSRFSGSGSGTDFTLTISSLQPEDFATYYCLQDAATPITFGQGTRLEIKTTTPAPRPPTPAPTIASQPLSLRPEACRPAAGGAVHTRGLDFACDIYIWAPLAGTCGVLLLSLVITLYCRRDQRLPPDAHKPPGGGSFRTPIQEEQADAHSTLAKIRVKFSRSADAPAYQQGQNQLYNELNLGRREEYDVLDKRRGRDPEMGGKPRRKNPQEGLYNELQKDKMAEAYSEIGMKGERRRGKGHDGLYQGLSTATKDTYDALHMQALPPR

SEQ ID NO: 978 - protein, 501 aa, Artificial Sequence
  Synthetic
MALPVTALLLPLALLLHAARPDYKDDDDKGGGGSGGGGSQVQLVQSGAEVKKPGASVKVSCKASGYTFTSYDINWVRQAPGQGLEWMGVISPSGGGTSYAQKFQGRVTMTRDTSTSTVYMELSSLRSEDTAVYYCARYYGGNPEGWYFDLWGRGTLVTVSSGGGGSGGGGSGGGGSDIQMTQSPSSLSASVGDRVTITCRASQSIGNWLAWYQQKPGKAPKLLIYDASDLETGVPSRFSGSGSGTDFTLTISSLQPEDFATYYCQQSYTTPWTFGQGTKVEIKTTTPAPRPPTPAPTIASQPLSLRPEACRPAAGGAVHTRGLDFACDIYIWAPLAGTCGVLLLSLVITLYCRRDQRLPPDAHKPPGGGSFRTPIQEEQADAHSTLAKIRVKFSRSADAPAYQQGQNQLYNELNLGRREEYDVLDKRRGRDPEMGGKPRRKNPQEGLYNELQKDKMAEAYSEIGMKGERRRGKGHDGLYQGLSTATKDTYDALHMQALPPR

SEQ ID NO: 979 - protein, 516 aa, Artificial Sequence
  Synthetic
MALPVTALLLPLALLLHAARPDYKDDDDKGGGGSGGGGSEVQLLESGGGLVQPGGSLRLSCAASGFVFDDYAIHWVRQAPGKGLEWVAAISYDGSNKYYADSVKGRFTISRDNSKNTLYLQMNSLRAEDTAVYYCARAPQYYGSGTDPLEVRYYYYGMDVWGQGTTVTVSSGGGGSGGGGSGGGGSDIVMTQSPLSLPVTPGEPASISCRSSQSLLHSNGYNYLDWYLQKPGQSPQLLIYEVSNRASGVPDRFSGSGSGTDFTLKISRVEAEDVGVYYCMKGLQTPLTFGPGTKVDIKTTTPAPRPPTPAPTIASQPLSLRPEACRPAAGGAVHTRGLDFACDIYIWAPLAGTCGVLLLSLVITLYCRRDQRLPPDAHKPPGGGSFRTPIQEEQADAHSTLAKIRVKFSRSADAPAYQQGQNQLYNELNLGRREEYDVLDKRRGRDPEMGGKPRRKNPQEGLYNELQKDKMAEAYSEIGMKGERRRGKGHDGLYQGLSTATKDTYDALHMQALPPR

SEQ ID NO: 980 - protein, 501 aa, Artificial Sequence
  Synthetic
MALPVTALLLPLALLLHAARPDYKDDDDKGGGGSGGGGSQVQLVQSGAEVKKPGSSVKVSCKASGGTFRNYAISWVRQAPGQGLEWMGGIIPIFGTANYAQKFQGRVTITADESTSTAYMELSSLRSEDTAVYYCARDHSAGTHHDAFDIWGQGTMVTVSSGGGGSGGGGSGGGGSDIQMTQSPSSLSASVGDRVTITCRASQGISNYLAWYQQKPGKAPKLLIYAASSLQSGVPSRFSGSGSGTDFTLTISSLQPEDFATYYCQQSHSTPLTFGQGTKVEIKTTTPAPRPPTPAPTIASQPLSLRPEACRPAAGGAVHTRGLDFACDIYIWAPLAGTCGVLLLSLVITLYCRRDQRLPPDAHKPPGGGSFRTPIQEEQADAHSTLAKIRVKFSRSADAPAYQQGQNQLYNELNLGRREEYDVLDKRRGRDPEMGGKPRRKNPQEGLYNELQKDKMAEAYSEIGMKGERRRGKGHDGLYQGLSTATKDTYDALHMQALPPR

SEQ ID NO: 981 - protein, 496 aa, Artificial Sequence
  Synthetic
MALPVTALLLPLALLLHAARPDYKDDDDKGGGGSGGGGSQVQLVQSGAEVKKPGASVKVSCKASGYTFTSYYIHWVRQAPGQGLEWMGWMNPNSGNAGYAQKFQGRVTMTRDTSTSTVYMELSSLRSEDTAVYYCAREYWGSFDYWGQGTLVTVSSGGGGSGGGGSGGGGSDIQMTQSPSSLSASVGDRVTITCRASQGISNNLNWYQQKPGKAPKLLIYDASNLETGVPSRFSGSGSGTDFTLTISSLQPEDFATYYCQQSYSTPYTFGQGTKVEIKTTTPAPRPPTPAPTIASQPLSLRPEACRPAAGGAVHTRGLDFACDIYIWAPLAGTCGVLLLSLVITLYCRRDQRLPPDAHKPPGGGSFRTPIQEEQADAHSTLAKIRVKFSRSADAPAYQQGQNQLYNELNLGRREEYDVLDKRRGRDPEMGGKPRRKNPQEGLYNELQKDKMAEAYSEIGMKGERRRGKGHDGLYQGLSTATKDTYDALHMQALPPR

SEQ ID NO: 982 - protein, 497 aa, Artificial Sequence
  Synthetic
MALPVTALLLPLALLLHAARPDYKDDDDKGGGGSGGGGSQVQLVQSGAEVKKPGASVKVSCKASGYTFTGYYMHWVRQAPGQGLEWMGMIDPSDGSTIYAQKFQGRVTMTRDTSTSTVYMELSSLRSEDTAVYYCARERPLYASDLWGQGTLVTVSSGGGGSGGGGSGGGGSDIQMTQSPSSLSASVGDRVTITCRASQDIGNDLGWYQQKPGKAPKLLIYAASSLQSGVPSRFSGSGSGTDFTLTISSLQPEDFATYYCLQDYDYPLTFGQGTKVEIKTTTPAPRPPTPAPTIASQPLSLRPEACRPAAGGAVHTRGLDFACDIYIWAPLAGTCGVLLLSLVITLYCRRDQRLPPDAHKPPGGGSFRTPIQEEQADAHSTLAKIRVKFSRSADAPAYQQGQNQLYNELNLGRREEYDVLDKRRGRDPEMGGKPRRKNPQEGLYNELQKDKMAEAYSEIGMKGERRRGKGHDGLYQGLSTATKDTYDALHMQALPPR

SEQ ID NO: 983 - protein, 498 aa, Artificial Sequence
  Synthetic
MALPVTALLLPLALLLHAARPDYKDDDDKGGGGSGGGGSQVQLVQSGAEVKKPGSSVKVSCKASGYTFTNYYMHWVRQAPGQGLEWMGWMNPDSGNTGYAQKFQGRVTITADESTSTAYMELSSLRSEDTAVYYCARSSSSWPDFDLWGRGTLVTVSSGGGGSGGGGSGGGGSDIQMTQSPSSLSASVGDRVTITCRASQSISSYLNWYQQKPGKAPKLLIYDASNLETGVPSRFSGSGSGTDFTLTISSLQPEDFATYYCQQSYNTPYSFGQGTKVEIKTTTPAPRPPTPAPTIASQPLSLRPEACRPAAGGAVHTRGLDFACDIYIWAPLAGTCGVLLLSLVITLYCRRDQRLPPDAHKPPGGGSFRTPIQEEQADAHSTLAKIRVKFSRSADAPAYQQGQNQLYNELNLGRREEYDVLDKRRGRDPEMGGKPRRKNPQEGLYNELQKDKMAEAYSEIGMKGERRRGKGHDGLYQGLSTATKDTYDALHMQALPPR

SEQ ID NO: 984 - protein, 499 aa, Artificial Sequence
  Synthetic
MALPVTALLLPLALLLHAARPDYKDDDDKGGGGSGGGGSQVQLVQSGAEVKKPGASVKVSCKASGYTFTSYSMHWVRQAPGQGLEWVGIINPSSGSASYAQKFQGRVTMTRDTSTSTVYMELSSLRSEDTAVYYCARERGAYSSTFDYWGQGTLVTVSSGGGGSGGGGSGGGGSDIQMTQSPSSLSASVGDRVTITCRTSQSISSYLNWYQQKPGKAPKLLIYDASNLETGVPSRFSGSGSGTDFTLTISSLQPEDFATYYCLQDYSYPLTFGQGTKVEIKTTTPAPRPPTPAPTIASQPLSLRPEACRPAAGGAVHTRGLDFACDIYIWAPLAGTCGVLLLSLVITLYCRRDQRLPPDAHKPPGGGSFRTPIQEEQADAHSTLAKIRVKFSRSADAPAYQQGQNQLYNELNLGRREEYDVLDKRRGRDPEMGGKPRRKNPQEGLYNELQKDKMAEAYSEIGMKGERRRGKGHDGLYQGLSTATKDTYDALHMQALPPR

SEQ ID NO: 985 - protein, 499 aa, Artificial Sequence
  Synthetic
MALPVTALLLPLALLLHAARPDYKDDDDKGGGGSGGGGSQVQLVQSGAEVKKPGASVKVSCKASGYTFTDYYMHWVRQAPGQGLEWMGVINPSDGTAHYAQRLQGRVTMTRDTSTSTVYMELSSLRSEDTAVYYCARDSGSYYADFDYWGQGTLVTVSSGGGGSGGGGSGGGGSDIQMTQSPSSLSASVGDRVTITCQASQDISNYLNWYQQKPGKAPKLLIYDASSLQSGVPSRFSGSGSGTDFTLTISSLQPEDFATYYCQQSYSTPPAFGQGTKVEIKTTTPAPRPPTPAPTIASQPLSLRPEACRPAAGGAVHTRGLDFACDIYIWAPLAGTCGVLLLSLVITLYCRRDQRLPPDAHKPPGGGSFRTPIQEEQADAHSTLAKIRVKFSRSADAPAYQQGQNQLYNELNLGRREEYDVLDKRRGRDPEMGGKPRRKNPQEGLYNELQKDKMAEAYSEIGMKGERRRGKGHDGLYQGLSTATKDTYDALHMQALPPR

SEQ ID NO: 986 - protein, 764 aa, Artificial Sequence
  Synthetic
MALPVTALLLPLALLLHAARPDYKDDDDKGGGGSGGGGSQVQLVQSGAEVKKPGASVKVSCKASGYSFTSYYMHWVRQAPGQGLEWMGIINPSGGTTSYAQKFQGRVTMTRDTSTSTVYMELSSLRSEDTAVYYCARDNSPYSSSWWDYFDYWGQGTLVTVSSGGGGSGGGGSGGGGSDIQMTQSPSSLSASVGDRVTITCRASQDIRHYLAWYQQKPGKAPKLLIYDASSLQSGVPSRFSGSGSGTDFTLTISSLQPEDFATYYCQQTYDAPITFGQGTRLEIKGGGGSGGGGSGGGGSQVQLVQSGAEVKKPGASVKVSCKASGYSFTSYYMHWVRQAPGQGLEWMGIINPSGGTTSYAQKFQGRVTMTRDTSTSTVYMELSSLRSEDTAVYYCARDNSPYSSSWWDYFDYWGQGTLVTVSSGGGGSGGGGSGGGGSDIQMTQSPSSLSASVGDRVTITCRASQDIRHYLAWYQQKPGKAPKLLIYDASSLQSGVPSRFSGSGSGTDFTLTISSLQPEDFATYYCQQTYDAPITFGQGTRLEIKTTTPAPRPPTPAPTIASQPLSLRPEACRPAAGGAVHTRGLDFACDIYIWAPLAGTCGVLLLSLVITLYCRRDQRLPPDAHKPPGGGSFRTPIQEEQADAHSTLAKIRVKFSRSADAPAYQQGQNQLYNELNLGRREEYDVLDKRRGRDPEMGGKPRRKNPQEGLYNELQKDKMAEAYSEIGMKGERRRGKGHDGLYQGLSTATKDTYDALHMQALPPR

SEQ ID NO: 987 - protein, 764 aa, Artificial Sequence
  Synthetic
MALPVTALLLPLALLLHAARPDYKDDDDKGGGGSGGGGSQVQLVQSGAEVKKPGSSVKVSCKASGYTFTSYGISWVRQAPGQGLEWMGGIIPIFGTTNYAQKFQGRVTITADESTSTAYMELSSLRSEDTAVYYCARDHSGDGYFDLWGRGTLVTVSSGGGGSGGGGSGGGGSDIVMTQSPLSLPVTPGEPASISCRSSQSLLHSNGYNYLDWYLQKPGQSPQLLIYDASSLQSGVPDRFSGSGSGTDFTLKISRVEAEDVGVYYCMQGTHWPPTFGQGTKVEIKGGGGSGGGGSGGGGSQVQLVQSGAEVKKPGSSVKVSCKASGYTFTSYGISWVRQAPGQGLEWMGGIIPIFGTTNYAQKFQGRVTITADESTSTAYMELSSLRSEDTAVYYCARDHSGDGYFDLWGRGTLVTVSSGGGGSGGGGSGGGGSDIVMTQSPLSLPVTPGEPASISCRSSQSLLHSNGYNYLDWYLQKPGQSPQLLIYDASSLQSGVPDRFSGSGSGTDFTLKISRVEAEDVGVYYCMQGTHWPPTFGQGTKVEIKTTTPAPRPPTPAPTIASQPLSLRPEACRPAAGGAVHTRGLDFACDIYIWAPLAGTCGVLLLSLVITLYCRRDQRLPPDAHKPPGGGSFRTPIQEEQADAHSTLAKIRVKFSRSADAPAYQQGQNQLYNELNLGRREEYDVLDKRRGRDPEMGGKPRRKNPQEGLYNELQKDKMAEAYSEIGMKGERRRGKGHDGLYQGLSTATKDTYDALHMQALPPR

SEQ ID NO: 988 - protein, 752 aa, Artificial Sequence
  Synthetic
MALPVTALLLPLALLLHAARPDYKDDDDKGGGGSGGGGSQVQLVQSGAEVKKPGASVKVSCKASGYTFTENEMHWVRQAPGQGLEWMGWINPNSGGTNYAQKFQGRVTMTRDTSTSTVYMELSSLRSEDTAVYYCAGSWGGYYFDYWGQGTLVTVSSGGGGSGGGGSGGGGSDIQMTQSPSSLSASVGDRVTITCRASQSVSRYLNWYQQKPGKAPKLLIYDASNLETGVPSRFSGSGSGTDFTLTISSLQPEDFATYYCQQADSFPVTFGQGTKLEIKGGGGSGGGGSGGGGSQVQLVQSGAEVKKPGASVKVSCKASGYTFTENEMHWVRQAPGQGLEWMGWINPNSGGTNYAQKFQGRVTMTRDTSTSTVYMELSSLRSEDTAVYYCAGSWGGYYFDYWGQGTLVTVSSGGGGSGGGGSGGGGSDIQMTQSPSSLSASVGDRVTITCRASQSVSRYLNWYQQKPGKAPKLLIYDASNLETGVPSRFSGSGSGTDFTLTISSLQPEDFATYYCQQADSFPVTFGQGTKLEIKTTTPAPRPPTPAPTIASQPLSLRPEACRPAAGGAVHTRGLDFACDIYIWAPLAGTCGVLLLSLVITLYCRRDQRLPPDAHKPPGGGSFRTPIQEEQADAHSTLAKIRVKFSRSADAPAYQQGQNQLYNELNLGRREEYDVLDKRRGRDPEMGGKPRRKNPQEGLYNELQKDKMAEAYSEIGMKGERRRGKGHDGLYQGLSTATKDTYDALHMQALPPR

SEQ ID NO: 989 - protein, 767 aa, Artificial Sequence
  Synthetic
MALPVTALLLPLALLLHAARPDYKDDDDKGGGGSGGGGSQVQLVQSGAEVKKPGASVKVSCKASGYSFTSYYMHWVRQAPGQGLEWMGIINPSGGTTSYAQKFQGRVTMTRDTSTSTVYMELSSLRSEDTAVYYCARDNSPYSSSWWDYFDYWGQGTLVTVSSGGGGSGGGGSGGGGSDIQMTQSPSSLSASVGDRVTITCRASQDIRHYLAWYQQKPGKAPKLLIYDASSLQSGVPSRFSGSGSGTDFTLTISSLQPEDFATYYCQQTYDAPITFGQGTRLEIKGGGGSGGGGSGGGGSQVQLVQSGAEVKKPGSSVKVSCKASGGTFSSYAISWVRQAPGQGLEWMGGITPMFGTTDYAQKFQGRVTITADESTSTAYMELSSLRSEDTAVYYCARDERDGYATVAFDIWGQGTMVTVSSGGGGSGGGGSGGGGSDIVMTQSPLSLPVTPGEPASISCRSSQSLLHSNGYNYLDWYLQKPGQSPQLLIYDASNLETGVPDRFSGSGSGTDFTLKISRVEAEDVGVYYCMQGTHWPPTFGQGTKVEIKTTTPAPRPPTPAPTIASQPLSLRPEACRPAAGGAVHTRGLDFACDIYIWAPLAGTCGVLLLSLVITLYCRRDQRLPPDAHKPPGGGSFRTPIQEEQADAHSTLAKIRVKFSRSADAPAYQQGQNQLYNELNLGRREEYDVLDKRRGRDPEMGGKPRRKNPQEGLYNELQKDKMAEAYSEIGMKGERRRGKGHDGLYQGLSTATKDTYDALHMQALPPR

SEQ ID NO: 990 - protein, 762 aa, Artificial Sequence
  Synthetic
MALPVTALLLPLALLLHAARPDYKDDDDKGGGGSGGGGSQVQLVQSGAEVKKPGASVKVSCKASGYSFTSYYMHWVRQAPGQGLEWMGIINPSGGTTSYAQKFQGRVTMTRDTSTSTVYMELSSLRSEDTAVYYCARDNSPYSSSWWDYFDYWGQGTLVTVSSGGGGSGGGGSGGGGSDIQMTQSPSSLSASVGDRVTITCRASQDIRHYLAWYQQKPGKAPKLLIYDASSLQSGVPSRFSGSGSGTDFTLTISSLQPEDFATYYCQQTYDAPITFGQGTRLEIKGGGGSGGGGSGGGGSQVQLVQSGAEVKKPGASVKVSCKASGYTFTSYYMHWVRQAPGQGLEWMGIINPSDGGTSYADKFQGRVTMTRDTSTSTVYMELSSLRSEDTAVYYCARALAPLGWGDGMDVWGQGTTVTVSSGGGGSGGGGSGGGGSDIQMTQSPSSLSASVGDRVTITCQASQDISNYLNWYQQKPGKAPKLLIYDASNLETGVPSRFSGSGSGTDFTLTISSLQPEDFATYYCQQSYDGPITFGQGTRLEIKTTTPAPRPPTPAPTIASQPLSLRPEACRPAAGGAVHTRGLDFACDIYIWAPLAGTCGVLLLSLVITLYCRRDQRLPPDAHKPPGGGSFRTPIQEEQADAHSTLAKIRVKFSRSADAPAYQQGQNQLYNELNLGRREEYDVLDKRRGRDPEMGGKPRRKNPQEGLYNELQKDKMAEAYSEIGMKGERRRGKGHDGLYQGLSTATKDTYDALHMQALPPR

SEQ ID NO: 991 - protein, 767 aa, Artificial Sequence
  Synthetic
MALPVTALLLPLALLLHAARPDYKDDDDKGGGGSGGGGSQVQLVQSGAEVKKPGSSVKVSCKASGYTFTSYGISWVRQAPGQGLEWMGGIIPIFGTTNYAQKFQGRVTITADESTSTAYMELSSLRSEDTAVYYCARDHSGDGYFDLWGRGTLVTVSSGGGGSGGGGSGGGGSDIVMTQSPLSLPVTPGEPASISCRSSQSLLHSNGYNYLDWYLQKPGQSPQLLIYDASSLQSGVPDRFSGSGSGTDFTLKISRVEAEDVGVYYCMQGTHWPPTFGQGTKVEIKGGGGSGGGGSGGGGSQVQLVQSGAEVKKPGSSVKVSCKASGGTFSSYAISWVRQAPGQGLEWMGGITPMFGTTDYAQKFQGRVTITADESTSTAYMELSSLRSEDTAVYYCARDERDGYATVAFDIWGQGTMVTVSSGGGGSGGGGSGGGGSDIVMTQSPLSLPVTPGEPASISCRSSQSLLHSNGYNYLDWYLQKPGQSPQLLIYDASNLETGVPDRFSGSGSGTDFTLKISRVEAEDVGVYYCMQGTHWPPTFGQGTKVEIKTTTPAPRPPTPAPTIASQPLSLRPEACRPAAGGAVHTRGLDFACDIYIWAPLAGTCGVLLLSLVITLYCRRDQRLPPDAHKPPGGGSFRTPIQEEQADAHSTLAKIRVKFSRSADAPAYQQGQNQLYNELNLGRREEYDVLDKRRGRDPEMGGKPRRKNPQEGLYNELQKDKMAEAYSEIGMKGERRRGKGHDGLYQGLSTATKDTYDALHMQALPPR

SEQ ID NO: 992 - protein, 762 aa, Artificial Sequence
  Synthetic
MALPVTALLLPLALLLHAARPDYKDDDDKGGGGSGGGGSQVQLVQSGAEVKKPGSSVKVSCKASGYTFTSYGISWVRQAPGQGLEWMGGIIPIFGTTNYAQKFQGRVTITADESTSTAYMELSSLRSEDTAVYYCARDHSGDGYFDLWGRGTLVTVSSGGGGSGGGGSGGGGSDIVMTQSPLSLPVTPGEPASISCRSSQSLLHSNGYNYLDWYLQKPGQSPQLLIYDASSLQSGVPDRFSGSGSGTDFTLKISRVEAEDVGVYYCMQGTHWPPTFGQGTKVEIKGGGGSGGGGSGGGGSQVQLVQSGAEVKKPGASVKVSCKASGYTFTSYYMHWVRQAPGQGLEWMGIINPSDGGTSYADKFQGRVTMTRDTSTSTVYMELSSLRSEDTAVYYCARALAPLGWGDGMDVWGQGTTVTVSSGGGGSGGGGSGGGGSDIQMTQSPSSLSASVGDRVTITCQASQDISNYLNWYQQKPGKAPKLLIYDASNLETGVPSRFSGSGSGTDFTLTISSLQPEDFATYYCQQSYDGPITFGQGTRLEIKTTTPAPRPPTPAPTIASQPLSLRPEACRPAAGGAVHTRGLDFACDIYIWAPLAGTCGVLLLSLVITLYCRRDQRLPPDAHKPPGGGSFRTPIQEEQADAHSTLAKIRVKFSRSADAPAYQQGQNQLYNELNLGRREEYDVLDKRRGRDPEMGGKPRRKNPQEGLYNELQKDKMAEAYSEIGMKGERRRGKGHDGLYQGLSTATKDTYDALHMQALPPR

SEQ ID NO: 993 - protein, 761 aa, Artificial Sequence
  Synthetic
MALPVTALLLPLALLLHAARPDYKDDDDKGGGGSGGGGSQVQLVQSGAEVKKPGASVKVSCKASGYTFTENEMHWVRQAPGQGLEWMGWINPNSGGTNYAQKFQGRVTMTRDTSTSTVYMELSSLRSEDTAVYYCAGSWGGYYFDYWGQGTLVTVSSGGGGSGGGGSGGGGSDIQMTQSPSSLSASVGDRVTITCRASQSVSRYLNWYQQKPGKAPKLLIYDASNLETGVPSRFSGSGSGTDFTLTISSLQPEDFATYYCQQADSFPVTFGQGTKLEIKGGGGSGGGGSGGGGSQVQLVQSGAEVKKPGSSVKVSCKASGGTFSSYAISWVRQAPGQGLEWMGGITPMFGTTDYAQKFQGRVTITADESTSTAYMELSSLRSEDTAVYYCARDERDGYATVAFDIWGQGTMVTVSSGGGGSGGGGSGGGGSDIVMTQSPLSLPVTPGEPASISCRSSQSLLHSNGYNYLDWYLQKPGQSPQLLIYDASNLETGVPDRFSGSGSGTDFTLKISRVEAEDVGVYYCMQGTHWPPTFGQGTKVEIKTTTPAPRPPTPAPTIASQPLSLRPEACRPAAGGAVHTRGLDFACDIYIWAPLAGTCGVLLLSLVITLYCRRDQRLPPDAHKPPGGGSFRTPIQEEQADAHSTLAKIRVKFSRSADAPAYQQGQNQLYNELNLGRREEYDVLDKRRGRDPEMGGKPRRKNPQEGLYNELQKDKMAEAYSEIGMKGERRRGKGHDGLYQGLSTATKDTYDALHMQALPPR

SEQ ID NO: 994 - protein, 756 aa, Artificial Sequence
  Synthetic
MALPVTALLLPLALLLHAARPDYKDDDDKGGGGSGGGGSQVQLVQSGAEVKKPGASVKVSCKASGYTFTENEMHWVRQAPGQGLEWMGWINPNSGGTNYAQKFQGRVTMTRDTSTSTVYMELSSLRSEDTAVYYCAGSWGGYYFDYWGQGTLVTVSSGGGGSGGGGSGGGGSDIQMTQSPSSLSASVGDRVTITCRASQSVSRYLNWYQQKPGKAPKLLIYDASNLETGVPSRFSGSGSGTDFTLTISSLQPEDFATYYCQQADSFPVTFGQGTKLEIKGGGGSGGGGSGGGGSQVQLVQSGAEVKKPGASVKVSCKASGYTFTSYYMHWVRQAPGQGLEWMGIINPSDGGTSYADKFQGRVTMTRDTSTSTVYMELSSLRSEDTAVYYCARALAPLGWGDGMDVWGQGTTVTVSSGGGGSGGGGSGGGGSDIQMTQSPSSLSASVGDRVTITCQASQDISNYLNWYQQKPGKAPKLLIYDASNLETGVPSRFSGSGSGTDFTLTISSLQPEDFATYYCQQSYDGPITFGQGTRLEIKTTTPAPRPPTPAPTIASQPLSLRPEACRPAAGGAVHTRGLDFACDIYIWAPLAGTCGVLLLSLVITLYCRRDQRLPPDAHKPPGGGSFRTPIQEEQADAHSTLAKIRVKFSRSADAPAYQQGQNQLYNELNLGRREEYDVLDKRRGRDPEMGGKPRRKNPQEGLYNELQKDKMAEAYSEIGMKGERRRGKGHDGLYQGLSTATKDTYDALHMQALPPR

SEQ ID NO: 995 - DNA, 14 bp, Artificial Sequence
  Synthetic
atgctcaatgcgtc

SEQ ID NO: 996 - DNA, 14 bp, Artificial Sequence
  Synthetic
augcucaaugcguc
